(19) United States
(12) Patent Application Publication
(10) Pub. No.: US 2024/0254533 A1
(43) Pub. Date: Aug. 1, 2024

(54) METHODS FOR PRODUCING TRYPTAMINE DERIVATIVES

(71) Applicant: OCTARINE BIO APS, Copenhagen (DK)

(72) Inventors: Nicholas Stuart William MILNE, Copenhagen (DK); Annette Munch NIELSEN, Copenhagen (DK); Camilla Knudsen BADEN, Copenhagen (DK); Nethaji Janeshawari GALLAGE, Copenhagen (DK)

(21) Appl. No.: 18/563,923

(22) PCT Filed: May 25, 2022
(86) PCT No.: PCT/EP2022/064352

§ 371 Date: Nov. 24, 2023

(30) Foreign Application Priority Data
May 27, 2021 (EP) 21176391.7
Jan. 12, 2022 (EP) 22151219.7

(51) Int. Cl. C12P 19/44; C12N 9/02; C12N 9/10; C12N 9/12; C12N 9/88; C12N 15/52

(52) U.S. Cl. CPC C12P 19/44; C12N 9/0061; C12N 9/0071; C12N 9/1007; C12N 9/1029; C12N 9/1051; C12N 9/1077; C12N 9/1205; C12N 9/88; C12N 15/52; C12Y 203/01087; C12Y 203/01152; C12Y 403/03002

(57) ABSTRACT

The present disclosure relate to a method for producing a tryptamine derivative of formula (I), wherein the tryptamine derivative (I) is not tryptophane, 4-hydroxytryptamine, N-acetyl-4-hydroxytryptamine, norbaeocystin, baeocystin; psilocybin, psilocin, aeruginascin, halogenated tryptophan, halogenated tryptamine, halogenated N-methylated tryptamine, halogenated N,N-dimethyltryptamine or halogenated N,N,N-trimethyltryptamine; said method comprising providing an indole acceptor of the formula (II), wherein the tryptamine derivative (I) is not tryptophane, 4-hydroxytryptamine, N-acetyl-4-hydroxytryptamine, norbaeocystin, baeocystin; psilocybin, psilocin, aeruginascin, halogenated tryptophan, halogenated tryptamine, halogenated N-methylated tryptamine, halogenated N,N-dimethyltryptamine or halogenated N,N,N-trimethyltryptamine; said method comprising providing an indole acceptor of the formula (II), wherein one or more of RII, RIV, RV, RVI or RVII is not H and Rill is H or CH2CH2NH2 or CH2CHCOOHNH2; and contacting the indole acceptor with a substituent donor in the presence of one or more enzymes substituting one or more H, OH and/or COOH in the indole acceptor with one or more substituents of the substituent donor.

[chemical structure]

### FIELD

[0001] The present invention relates to methods for making tryptamine derivatives and to tryptamine derivatives resulting therefrom.

### BACKGROUND

[0002] Tryptamines are well known including serotonin, an important neurotransmitter, and melatonin, a hormone involved in regulating the sleep-wake cycle. Tryptamine alkaloids are found in fungi, plants, and animals; and sometimes used by humans for the neurological or psychotropic effects of the substance. Prominent examples of tryptamine alkaloids include psilocybin (from “Psilocybin mushrooms”) and Dimethyltryptamine (DMT). DMT is obtained from numerous plant sources, like chacruna, and it is often used in ayahuasca brews. Many synthetic tryptamines have also been made, including migraine drugs and psychedelic drugs. Substituted tryptamines, or serotonin analogues, are organic compounds which may be thought of as being derived from tryptamine itself. The molecular structures of all tryptamines contain an indole ring, joined to an amino (NH2) group via an ethyl (—CH2-CH2-) sidechain. In substituted tryptamines, the indole ring, sidechain, and/or amino group are modified by substituting another group for one of the hydrogen (H) atoms.

[0003] WO2019173797 relates to microbial cells that contain enzymes involved in a biosynthesis pathway converting anthranilate, indole or tryptophan into a tryptamine. WO2021052989 relates to biotechnological production of psilocybin and to halogenated tryptamines in a cell factory.

[0004] Still there is a continuous need for identifying new substituted tryptamines having new and/or enhanced properties with respect to therapeutic effect, administration, formulation and/or production of the substituted tryptamine and/or to devise new and optimized methods for producing such substituted tryptamines.

### SUMMARY

[0005] The present invention provides certain improvements offering solutions to drawbacks of known substituted tryptamine derivatives and methods for producing them using known technology. The invention also provides enzymes, which surprisingly acts to catalyze substitutions in tryptamines both in vitro and in vivo and thereby circumvent drawbacks of the known technology and moreover which also integrate and work in genetically modified host cells to produce therein such substituted tryptamine derivatives. The inventors have also found that these substitutions in tryptamines not only produce hitherto unknown substituted tryptamine derivatives, which possesses interesting useful properties, but in vivo expression of substituting enzymes also offers a range of hitherto unknown advantages in processes of producing the substituted tryptamine derivatives in genetically modified cell factories, such as yeast, including but not limited to (i) reducing product inhibition of pathways producing tryptamine by presence of high concentrations of tryptamines or tryptophan; (ii) facilitating export of compounds into the extracellular space; (iii) and reducing the toxicity of tryptamine derived compounds to the microbial host.

[0006] Accordingly, in a first aspect the invention provides a method for producing a tryptamine derivative of formula (I):

[chemical structure]

wherein the tryptamine derivative (I) is not tryptophan, 4-hydroxytryptamine, N-acetyl-4-hydroxytryptamine, norbaeocystin, baeocystin; psilocybin, psilocin, aeruginascin, halogenated tryptophan, halogenated tryptamine, halogenated N-methylated tryptamine, halogenated N,N-dimethyltryptamine or halogenated N,N,N-trimethyltryptamine; said method comprising providing an indole acceptor of the formula (II):

[chemical structure]

wherein one or more of R_{II}, R_{IV}, R_{V}, R_{VI} or R_{VII} is not H and R_{III} is H or CH₂CH₂NH₂ or CH₂CHCOOHNH₂; and contacting the indole acceptor with a substituent donor in the presence of one or more enzymes substituting one or more H, OH and/or COOH in the indole acceptor with one or more substituents of the substituent donor.

[0007] In a further aspect of the invention provides a tryptamine derivative of formula (I):

[chemical structure]

wherein at least one of R₂, R₄ to R₉, α and β is a glycosyl group. Particularly R₂, R₄ to R₇, α and β may be an O-glycosyl group.

[0008] In a further aspect the invention provides a microbial host cell genetically modified to perform the method of the invention and produce the tryptamine derivative, wherein the host cell expresses one or more heterologous genes encoding the one or more enzymes, which in the presence of the indole acceptor and one or more substituent donors, transfers one or more substituents to the one or more H, OH and/or COOH of the indole acceptor.

[0009] In further aspects the invention provides a cell culture, comprising host cell of the invention and a growth medium; a fermentation liquid comprising the tryptamine derivative (I) comprised in the cell culture of the invention; and a composition comprising the fermentation liquid of the invention and/or the the tryptamine derivative (I) of the invention and one or more agents, additives and/or excipients.

### DESCRIPTION OF DRAWINGS AND FIGURES

[0010] FIG. 1, shows a biosynthetic pathway for the production of tryptamine in S. cerevisiae. Overexpressed genes are shown in bold, relevant gene deletions involved in the biosynthetic pathway are indicated with a cross.

[0011] FIG. 2 shows a general scheme for integration of gene overexpression cassettes into S. cerevisiae genome. Linear expression cassettes contain overlapping homology to each other while the outermost cassettes (Rec 1 and Rec 5) contain homology to a genomic landing pad in the S. cerevisiae genome. Transformation of linear cassettes results in assembly and integration by homologous recombination.

[0012] FIG. 3 shows gene deletion by Ura3 marker replacement. The Ura3 cassette is amplified with primers introducing upstream and downstream homology to the gene to be deleted. Gene deletion occurs by homologous recombination and replacement with the Ura3 marker. The marker can subsequently be looped out in a scarless manner and the Ura3 marker can be reused.

[0013] FIG. 4 shows structures of substituted tryptamine glucosides validated by LC-MS/QTOF.

[0014] FIG. 5 shows an example of a LC-MS-QTOF chromatogram from in vitro conversion of psilocin to OBT-001 (psilocin-O-β-D-glucoside) by At71C2 (SEQ ID NO's. 193, 194) and further showing the retention time (RT), expected and measured mass of each compound and fragmentation pattern as determined by LC-MS/QTOF analysis.

[0015] FIG. 6 shows an example of LC-MS-QTOF chromatogram from in vitro conversion of noribogaine to OBT-002 noribogaine-O-β-D-glucoside by Pt73Y (SEQ ID NO's 203, 204) and further showing the retention time (RT), expected and measured mass of each compound and fragmentation pattern as determined by LC-MS/QTOF analysis.

[0016] FIG. 7 shows an example of a LC-MS-QTOF chromatogram from in vitro conversion of bufotenine to OBT-003 (bufotenine-O-β-D-glucoside) by At71C1_At71C2_353 (SEQ ID NO's. 243, 244), further showing the retention time (RT), expected and measured mass of each compound and fragmentation pattern as determined by LC-MS/QTOF analysis.

[0017] FIG. 8 shows an example of LC-MS-QTOF chromatogram from in vitro conversion of serotonin to OBT-004 (serotonin-O-β-D-glucoside) by At71C1-Sr71E1_354 (SEQ ID NO's. 199, 200) and further showing the retention time (RT), expected and measured mass of each compound and fragmentation pattern as determined by LC-MS/QTOF analysis.

[0018] FIG. 9 show structures of substituted tryptamine xylosides validated by LC-MS/QTOF.

[0019] FIG. 10 shows a LC-MS-QTOF chromatogram from in vitro conversion of Psilocin to OBT-005 (psilocin-O-β-D-xyloside) by At71C2 (SEQ ID NO's. 193, 194) and further showing the retention time (RT), expected and measured mass of each compound and fragmentation pattern as determined by LC-MS/QTOF analysis.

[0020] FIG. 11 shows a LC-MS-QTOF chromatogram from in vitro conversion of Noribogaine to OBT-006 (noribogaine-O-β-D-xyloside) by Pt73Y (SEQ ID NO's. 203, 204) and further showing the retention time (RT), expected and measured mass of each compound and fragmentation pattern as determined by LC-MS/QTOF analysis.

[0021] FIG. 12 shows a LC-MS-QTOF chromatogram from in vitro conversion of Bufotenine to OBT-007 (bufotenine-O-β-D-xyloside) by Pt73Y (SEQ ID NO's. 203, 204) and further showing the retention time (RT), expected and measured mass of each compound and fragmentation pattern as determined by LC-MS/QTOF analysis.

[0022] FIG. 13 show the structure of Psilocin di-glucoside produced by combining multiple glycosyltransferases OBT-008 (Psilocin-O-β-D-glucoside-O-β-D-glucoside).

[0023] FIG. 14 shows an example of tryptamine production in SC-62, a S. cerevisiae strain engineered to efficiently produce tryptamine. Shown is an HPLC chromatogram of SC-62 after cultivation compared to an authentic tryptamine analytical standard.

[0024] FIG. 15 shows an example of serotonin production in SC-75, a S. cerevisiae strain engineered to efficiently produce serotonin. Shown is an HPLC chromatogram of SC-75 after cultivation compared to an authentic serotonin analytical standard.

[0025] FIG. 16 shows an example of 4-coumaroylserotonin production in ST-4CS2, a S. cerevisiae strain engineered to efficiently produce 4-coumaroylserotonin. Shown is an HPLC chromatogram of ST-4CS2 after cultivation compared to an authentic 4-coumaroylserotonin analytical standard.

[0026] FIG. 17 shows an example of psilocybin production in SC-206 and SC-302. SC-206 is a S. cerevisiae strain engineered to produce psilocybin, SC-302 is the same parental strain but with the DIA3 gene knocked out. Shown is HPLC chromatograms of SC-206 and SC-302 after cultivation compared to an authentic psilocybin analytical standard.

[0027] FIG. 18 shows an example of psilocybin production in SC-275 and SC-268. SC-275 is a S. cerevisiae strain engineered to produce psilocybin with a biosynthetic pathway from P. cubensis, SC-268 is a strain with a biosynthetic pathway from P. cyanescens. Shown in HPLC chromatograms of SC-275 and SC268 after cultivation compared to an authentic psilocybin analytical standard. Insert shows a zoomed in view of the psilocybin peaks for clarity.

[0028] FIG. 19 shows an example of melatonin production in SC-124, a S. cerevisiae strain engineered to efficiently produce melatonin. Shown is an HPLC chromatogram of SC-124 after cultivation compared to an authentic melatonin analytical standard. Insert shows a zoomed in view of the psilocybin peaks for clarity.

### INCORPORATION BY REFERENCE

[0029] All publications, patents, and patent applications referred to herein are incorporated by reference to the same extent as if each individual publication, patent, or patent application was specifically and individually indicated to be incorporated by reference. In the event of a conflict between a term herein and a term in an incorporated reference, the term herein prevails and controls.

### DETAILED DESCRIPTION

### Definitions

[0030] Any EC numbers than may be used herein refers to Enzyme Nomenclature 1992 from NC-IUBMB, Academic Press, San Diego, California, including 30 supplements 1-5 published in Eur. J. Bio-chem. 1994, 223, 1-5; Eur. J. Biochem. 1995, 232, 1-6; Eur. J. Biochem. 1996, 237, 1-5; Eur. J. Biochem. 1997, 250, 1-6; and Eur. J. Biochem. 1999, 264, 610-650; respectively. The nomenclature is regularly supplemented and updated; see e.g. http://enzvme.expasv.org/.

[0031] The term “fructose-6-phosphate phosphoketolase” as used herein refers to an enzyme catalyzing the reaction of fructose-6-phosphate into Erythrose-4-phosphate and acetyl phosphate.

[0032] The term “Phosphotransacetylase” as used herein refers to an enzyme catalyzing the reaction of Acetyl phosphate into Acetyl-CoA.

[0033] The term “DAHP synthase” as used herein refers to a 3-deoxy-D-arabino-heptulosonate 7-phosphate synthase enzyme catalyzing the reaction of phosphoenolpyruvate and erythrose-4-phosphate to 3-deoxy-D-arabino-heptulosonate-7-phosphate (DAHP).

[0034] The term “Arol” as used herein refers to EPSP synthase catalyzing conversion of DAHP into 5-enolpyruvoyl-shikimate 3-phosphate (EPSP).

[0035] The term “Shikimate kinase” as used herein refers to an enzyme catalyzing the reaction of Shikimate into Shikimate-3-phosphate.

[0036] The term “Chorismate synthase” as used herein refers to an enzyme catalyzing the reaction of 5-enolpyruvoyl-shikimate 3-phosphate into Chorismate.

[0037] The term “Anthranilate synthase” as used herein refers to an enzyme catalyzing the reaction of Chorismate into Anthranilate.

[0038] The term “Ribose-phosphate pyrophosphokinase” as used herein refers to an enzyme catalyzing the reaction of Ribose-5-phosphate into phospho-alpha-D-ribosyl-1-pyrophosphate.

[0039] The term “anthranilate phosphoribosyl transferase” as used herein refers to an enzyme catalyzing the reaction of anthranilate and phospho-alpha-D-ribosyl-1-pyrophosphate into N-(5-phosphoribosyl)-anthranilate.

[0040] The term “N-(5′-phosphoribosyl)-anthranilate isomerase” as used herein refers to an enzyme catalyzing the reaction of N-(5-phosphoribosyl)-anthranilate into 1-(o-carboxyphenylamino)-1′-deoxyribulose 5′-phosphate.

[0041] The term “indole-3-glycerol phosphate synthase” as used herein refers to an enzyme catalyzing the reaction of converting 1-(O-carboxyphenylamino)-1′-deoxyribulose 5′-phosphate into (1S,2R)-1-C-(indol-3-yl)-glycerol 3-phosphate.

[0042] The term “tryptophan synthase” as used herein refers to an enzyme catalyzing the reaction of converting (1S,2R)-1-C-(indol-3-yl) glycerol 3-phosphate+Serine into L-Tryptophan.

[0043] The term “Tryptophan decarboxylase” as used herein refers to an enzyme catalyzing the reaction of L-Tryptophan into Tryptamine.

[0044] The term “chorismate mutase” as used herein refers to an enzyme catalyzing the reaction of chorismate to prephenate.

[0045] The term “prephenate dehydrogenase” as used herein refers to an enzyme catalyzing the reaction of prephenate to phenylpyruvate.

[0046] The term “aromatic aminotransferase” as used herein refers to an enzyme catalyzing the reaction of phenylpyruvate to phenylalanine.

[0047] The term “phenylalanine ammonium lyase” as used herein refers to an enzyme catalyzing the reaction of phenylalanine to cinnamate.

[0048] The term “Cinnamate 4-hydroxylase” as used herein refers to an enzyme catalyzing the reaction of cinnamate to coumarate.

[0049] The term “CPR” as used herein refers to a cytochrome P450 reductase catalyzing the electron transfer (from NADPH) to a cytochrome P450 enzyme, typically in the endoplasmic reticulum of a eukaryotic cell.

[0050] The term “Cytochrome P450 enzyme” or “P450 enzymes” or “P450” as used herein interchangeably refers to a family of enzymes containing heme as a cofactor. The P450's of the invention may catalyze oxidation, hydroxylation (hydroxylases) of substrates, and/or catalyze the addition of nitrogen dioxide (NO₂) to substrates.

[0051] The term “4-Coumoryl-CoA ligase” as used herein refers to an enzyme catalyzing the reaction of Coumarate to 4-coumoryl CoA.

[0052] The term “Tryptophanase” as used herein refers to an enzyme catalyzing the reaction of tryptophan or a derivative thereof into indole or a derivative thereof.

[0053] The term “Tryptophan synthase” as used herein refers to an enzyme catalyzing the reaction of indole or a derivative thereof and serine or a derivative thereof into Tryptophan or a derivative thereof.

[0054] The terms “Tryptophan decarboxylase” or “non-canonical aromatic amino acid decarboxylase” as used herein refers to an enzyme catalyzing the reaction of Tryptophan or a derivative thereof into Tryptamine or a derivative thereof.

[0055] The term “glycosyl transferase” or “GT” as used herein refers to enzymes (EC2.4) that catalyze formation of glycosides by transfer of a glycosyl group (sugar) from an activated glycosyl donor to a nucleophilic glycosyl acceptor molecule, the nucleophile of which can be oxygen-carbon-, nitrogen-, or sulfur-based. The product of glycosyl transfer may be an O-, N-, S-, or C-glycoside. In the context of the present invention the nucleophilic glycosyl acceptor is a tryptamine or tryptophan derivative or a glycosylated tryptamine or tryptophan derivative and the product of glycosyl transfer is an O- or C-glycoside.

[0056] Glycosyl transferases may further be divided into different GT families depending on the 3D structure and reaction mechanism. More specifically the GT1 superfamily refers to UDP glycosyl transferases (UGTs) containing the PSPG box binding UDP-sugars. UGT-superfamily members may further be divided into families and subfamilies as defined by the UGT Nomenclature Committee (Mackenzie et al., 1997) depending on the amino acid identity.

[0057] The terms “N-methyltransferase” and “O-methyltransferase” and “C-methyltransferase” as used herein refers to an enzyme catalyzing the reaction of methylation of an N, O or C moiety respectively.

[0058] The terms “strictosidine synthase” or “1-acetyl-β-carboline synthase” as used herein refers to an enzyme catalyzing the reaction of a tryptamine and an aldehyde into a β-carboline.

[0059] The term “N-acetyltransferase” as used herein refers to an enzyme catalyzing the reaction of a tryptamine or derivative thereof into N-acetyltryptamine or derivative thereof.

[0060] The term “hydroxytryptamine kinase” as used herein refers to an enzyme catalyzing the reaction of a hydroxytryptamine or derivative thereof into a phosphoryloxytryptamine or derivative thereof. The hydroxytryptamine may for example be a 4-hydroxytryptamine or a 7-hydroxytryptamine.

[0061] The term “N-hydroxycinnamoyltransferase” as used herein refers to an enzyme catalyzing the reaction of a tryptamine or derivative thereof and a cinnamoyl-CoA into a N-cinnamoyltryptamine or derivative thereof and CoA.

[0062] The term “psilocybin phosphatase” as used herein refers to an enzyme catalyzing the reaction of a R-phosphoryloxytryptamine or derivative thereof into a R-hydroxytryptamine or derivative thereof.

[0063] The term “psilocin laccase” as used herein refers to an enzyme catalyzing the reaction of a R-hydroxytryptamine or derivative thereof into a tryptamine quinoid or derivative thereof.

[0064] The term “Tryptophan halogenase” as used herein refers to an enzyme catalyzing the reaction of a tryptamine or derivative thereof into a halogenated tryptamine or derivative thereof.

[0065] The term “lyase” as used herein refers to an enzyme catalyzing the cleavage of bonds resulting in the splitting of molecules into separate components.

[0066] The term “flavin monooxygenase” as used herein refers to an enzyme catalyzing the oxidization of substrates using NADPH as a co-factor and flavin adenine dinucleotide (FAD) as a prothetic group.

[0067] The term “nucleotide glycoside” as used herein about glycosyl donors refers to compounds comprising a nucleotide moiety covalently linked to a glycosyl group, where the nucleotide comprises, a nucleoside covalently linked to one or more phosphate groups. Such compounds are also referred to as “activated glycosides” and where the glycosyl group is a sugar as “nucleotide sugars” or “activated sugars”.

[0068] The term “heterologous” or “recombinant” and its grammatical equivalents as used herein refers to entities “derived from a different species or cell”. For example, a heterologous or recombinant polynucleotide gene is a gene in a host cell not naturally containing that gene, i.e. the gene is from a different species or cell type than the host cell.

[0069] The term “genetically modified host cell” as used herein refers to host cell comprising and expressing heterologous or recombinant polynucleotide genes.

[0070] The term “pathway” or “metabolic pathway” or “biosynthetic metabolic pathway” or “operative biosynthetic metabolic pathway” as used herein interchangeably is intended to mean one or more enzymes acting in a live cell to convert a chemical substrate into a chemical product. A pathway may include one enzyme or multiple enzymes acting in sequence. A pathway including only one enzyme may also herein be referred to as “bioconversion”, which is particularly relevant where a cell is fed with a precursor or substrate to be converted by the enzyme into a desired product molecule. Enzymes are characterized by having catalytic activity, which can change the chemical structure of the substrate(s).

[0071] An enzyme may have more than one substrate and produce more than one product. The enzyme may also depend on cofactors, which can be inorganic chemical compounds or organic compounds (co-factor and/or co-enzymes). The NADPH-dependent cytochrome P450 reductase (CPR) is an electron donor to cytochromes P450 (CYPs). CPR shuttles electrons from NADPH through the Flavin Adenine Dinucleotide (FAD) and Flavin Mononucleotide (FMN) coenzymes into the iron of the prosthetic heme-group of the CYP.

[0072] The term “in vivo”, as used herein refers to within a living cell or organism, including, for example animal, a plant, or a microorganism.

[0073] The term “in vitro”, as used herein refers to outside a living cell or organism, including, without limitation, for example, in a microwell plate, a tube, a flask, a beaker, a tank, a reactor and the like.

[0074] The term “substrate” or “precursor”, as used herein refers to any compound that can be converted into a different compound. For example, thebaine can be a substrate for P450 and can be converted by demethuylation into Northebaine. For clarity, substrates and/or precursors include both compounds generated in situ by a enzymatic reaction in a cell or exogenously provided compounds, such as exogenously provided organic molecules which the host cell can metabolize into a desired compound.

[0075] Term “endogenous” or “native” as used herein refers to a gene or a polypepetide in a host cell which originates from the same host cell.

[0076] The term “deletion” as used herein refers to manipulation of a gene so that it is no longer expressed in a host cell.

[0077] The term “disruption” as used herein refers to manipulation of a gene or any of the machinery participating in the expression the gene, so that it is no longer expressed in a host cell.

[0078] The term “attenuation” as used herein refers to manipulation of a gene or any of the machinery participating in the expression the gene, so that it the expression of the gene is reduced as compared to expression without the manipulation.

[0079] The terms “substantially” or “approximately” or “about”, as used herein refers to a reasonable deviation around a value or parameter such that the value or parameter is not significantly changed. These terms of deviation from a value should be construed as including a deviation of the value where the deviation would not negate the meaning of the value deviated from. For example, in relation to a reference numerical value the terms of degree can include a range of values plus or minus 10% from that value. For example, using these deviating terms can also include a range deviation plus or minus such as plus or minus 9%, 8%, 7%, 6%, 5%, 4%, 3%, 2%, or 1% from a specified value.

[0080] The term “and/or” as used herein is intended to represent an inclusive “or”. The wording X and/or Y is meant to mean both X or Y and X and Y. Further the wording X, Y and/or Z is intended to mean X, Y and Z alone or any combination of X, Y, and Z.

[0081] The terms “isolated” or “purified” or “extracted” or “recovered” as used herein interchangably about a compound, refers to any compound, which by means of human intervention, has been put in a form or environment that differs from the form or environment in which it is found in nature. Isolated compounds include but is not limited to compounds of the invention for which the ratio of the compounds relative to other constituents with which they are associated in nature is increased or decreased. In an important embodiment the amount of compound is increased relative to other constituents with which the compound is associated in nature. In an embodiment the compound of the invention may be isolated into a pure or substantially pure form. In this context a substantially pure compound means that the compound is separated from other exogenous or unwanted material present from the onset of producing the compound or generated in the manufacturing process. Such a substantially pure compound preparation contains less than 10%, such as less than 8%, such as less than 6%, such as less than 5%, such as less than 4%, such as less than 3%, such as less than 2%, such as less than 1%, such as less than 0.5% by weight of other exogenous or unwanted material usually associated with the compound when expressed natively or recombinantly. In an embodiment the isolated compound is at least 90% pure, such as at least 91% pure, such as at least 92% pure, such as at least 93% pure, such as at least 94% pure, such as at least 95% pure, such as at least 96% pure, such as at least 97% pure, such as at least 98% pure, such as at least 99% pure, such as at least 99.5% pure, such as 100% pure by weight.

[0082] The term “% identity” is used herein about the relatedness between two amino acid sequences or between two nucleotide sequences. “% identity” as used herein about amino acid sequences refers to the degree of identity in percent between two amino acid sequences obtained when using the Needleman-Wunsch algorithm (Needleman and Wunsch, 1970, J. Mol. Biol. 48: 443-453) as implemented in the Needle program of the EMBOSS package (EMBOSS: The European Molecular Biology Open Software Suite, Rice et al., 2000, Trends Genet. 16: 276-277), preferably version 5.0.0 or later. The parameters used are gap open penalty of 10, gap extension penalty of 0.5, and the EBLOSUM62 (EMBOSS version of BLOSUM62) substitution matrix. The output of Needle labeled “longest identity” (obtained using the -nobrief option) is used as the percent identity and is calculated as follows:

$$\frac{identical amino acid residues}{Length of alignment - total number of gaps in alignment} \times 100$$

“% identity” as used herein about nucleotide sequences refers to the degree of identity in percent between two nucleotide sequences obtained when using the Needleman-Wunsch algorithm (Needleman and Wunsch, 1970, supra) as implemented in the Needle program of the EMBOSS package (EMBOSS: The European Molecular Biology Open Software Suite, Rice et al., 2000, supra), preferably version 5.0.0 or later. The parameters used are gap open penalty of 10, gap extension penalty of 0.5, and the EDNAFULL (EMBOSS version of NCBI NUC4.4) substitution matrix. The output of Needle labeled “longest identity” (obtained using the -nobrief option) is used as the percent identity and is calculated as follows:

$$\frac{identical deoxyribonucleotides}{Length of alignment - total number of gaps in alignment} \times 100$$

[0083] The protein sequences of the present invention can further be used as a “query sequence” to perform a search against sequence databases, for example to identify other family members or related sequences.

[0084] Such searches can be performed using the BLAST programs. Software for performing BLAST analyses is publicly available through the National Center for Biotechnology Information (http://www.ncbi.nlm.nih.gov). BLASTP is used for amino acid sequences and BLASTN for nucleotide sequences. The BLAST program uses as defaults:
[0085] Cost to open gap: default=5 for nucleotides/11 for proteins
[0086] Cost to extend gap: default=2 for nucleotides/1 for proteins
[0087] Penalty for nucleotide mismatch: default=−3
[0088] Reward for nucleotide match: default=1
[0089] Expect value: default=10
[0090] Word size: default=11 for nucleotides/28 for megablast/3 for proteins.

[0091] Furthermore, the degree of local identity between the amino acid sequence query or nucleic acid sequence query and the retrieved homologous sequences is determined by the BLAST program. However only those sequence segments are compared that give a match above a certain threshold. Accordingly, the program calculates the identity only for these matching segments. Therefore, the identity calculated in this way is referred to as local identity.

[0092] The term “cDNA” refers to a DNA molecule that can be prepared by reverse transcription from a mature, spliced, mRNA molecule obtained from a eukaryotic or prokaryotic cell. cDNA lacks intron sequences that may be present in the corresponding genomic DNA. The initial, primary RNA transcript is a precursor to mRNA that is processed through a series of steps, including splicing, before appearing as mature spliced mRNA.

[0093] The term “coding sequence” refers to a nucleotide sequence, which directly specifies the amino acid sequence of a polypeptide. The boundaries of the coding sequence are generally determined by an open reading frame, which begins with a start codon such as ATG, GTG, or TTG and ends with a stop codon such as TAA, TAG, or TGA. The coding sequence may be a genomic DNA, cDNA, synthetic DNA, or a combination thereof.

[0094] The term “control sequence” as used herein refers to a nucleotide sequence necessary for expression of a polynucleotide encoding a polypeptide. A control sequence may be native (i.e., from the same gene) or heterologous or foreign (i.e., from a different gene) to the polynucleotide encoding the polypeptide. Control sequences include, but are not limited to leader sequences, polyadenylation sequence, pro-peptide coding sequence, promoter sequences, signal peptide coding sequence, translation terminator (stop) sequences and transcription terminator (stop) sequences. To be operational control sequences usually must include promoter sequences, transcriptional and translational stop signals. Control sequences may be provided with linkers for the purpose of introducing specific restriction sites facilitating ligation of the control sequences with a coding region of a polynucleotide encoding a polypeptide.

[0095] The term “expression” includes any step involved in the production of a polypeptide including, but not limited to, transcription, post-transcriptional modification, translation, post-translational modification, and secretion.

[0096] The term “expression vector” refers to a linear or circular DNA molecule that comprises a polynucleotide encoding a polypeptide and is operably linked to control sequences that provide for its expression.

[0097] The term “host cell” refers to any cell type that is susceptible to transformation, transfection, transduction, or the like with a polynucleotide construct or expression vector comprising a polynucleotide of the present invention. The term “host cell” encompasses any progeny of a parent cell that is not identical to the parent cell due to mutations that occur during replication.

[0098] The term “polynucleotide construct” refers to a polynucleotide, either single- or double stranded, which is isolated from a naturally occurring gene or is modified to contain segments of nucleic acids in a manner that would not otherwise exist in nature, or which is synthetic, and which comprises one or more control sequences.

[0099] The term “operably linked” refers to a configuration in which a control sequence is placed at an appropriate position relative to the coding polynucleotide such that the control sequence directs expression of the coding polynucleotide.

[0100] The terms “nucleotide sequence” and “polynucleotide” are used herein interchangeably.

[0101] The term “comprise” and “include” as used throughout the specification and the accompanying claims as well as variations such as “comprises”, “comprising”, “includes” and “including” are to be interpreted inclusively. These words are intended to convey the possible inclusion of other elements or integers not specifically recited, where the context allows.

[0102] The articles “a” and “an” are used herein refers to one or to more than one (i.e. to one or at least one) of the grammatical object of the article. By way of example, “an element” may mean one element or more than one element.

[0103] Terms like “preferably”, “commonly”, “particularly”, and “typically” are not utilized herein to limit the scope of the claimed invention or to imply that certain features are critical, essential, or even important to the structure or function of the claimed invention. Rather, these terms are merely intended to highlight alternative or additional features that can or cannot be utilized in a particular embodiment of the present invention.

[0104] The term “cell culture” as used herein refers to a culture medium comprising a plurality of genetically modified host cells of the invention. A cell culture may comprise a single strain of genetically modified host cells or may comprise two or more distinct strains of genetically modified host cells. The culture medium may be any medium suitable for the genetically modified host cells, e.g., a liquid medium (i.e., a culture broth) or a semi-solid medium, and may comprise additional components, e.g., a carbon source such as dextrose, sucrose, glycerol, or acetate; a nitrogen source such as ammonium sulfate, urea, or amino acids; a phosphate source; vitamins; trace elements; salts; amino acids; nucleobases; yeast extract; aminoglycoside antibiotics such as G418 and hygromycin B.

### Method for Producing a Tryptamine Derivative

[0105] The invention provides a method for producing a tryptamine derivative of formula (I):

[chemical structure]

wherein the tryptamine derivative (I) is not tryptophan, 4-hydroxytryptamine, N-acetyl-4-hydroxytryptamine, norbaeocystin, baeocystin; psilocybin, psilocin, aeruginascin, halogenated tryptophan, halogenated tryptamine, halogenated N-methylated tryptamine, halogenated N,N-dimethyltryptamine or halogenated N,N,N-trimethyltryptamine; said method comprising providing an indole acceptor of the formula (II):

[chemical structure]

wherein one or more of RII to R_{VII} is not H and R_{III}, is H or CH₂CH₂NH₂ or CH₂CHCOOHNH₂; and contacting the indole acceptor with a substituent donor in the presence of one or more enzymes substituting one or more H, OH and/or COOH in the indole acceptor with one or more substituents of the substituent donor.

[0106] In some embodiments the one or more of positions R_{II}, R_{IV}, R_{V}, R_{VI} and/or R_{VII} of the indole acceptor (II) is OH, Cl, Br, F, I, CH₃, NO₂, PO₄, or CH₃—O. In particular tryptamine derivatives wherein R₄ and/or R₅ of Formula I is OH are useful. More specifically the the indole acceptor (II) is selected from 4-hydroxytryptamine, 5-hydroxytryptamine, Psilocybin, Psilocin, Norpsilocin, Baeocystin, Norbaeocystin, Aeruginascin, 4-hydroxy-N,N,N-trimethyltryptamine, Bufotenine, Norbufotenine, 5-hydroxy-N,N,N-trimethyltryptamine, 4-methoxytyptamine, 5-methoxytryptamine N-acetylserotonin, Ibogaine, Ibogamine, Noribogaine, Mitragynine, 7-OH-mitragynine, 4-HO-DET, 4-HO-DiPT, 4-HO-MET, 4-HO-MiPT, 4-HO-McPT, 4-HO-DPT, 4-HO-DSBT, and/or Harmalol, so that these indole acceptors is further derivatized with at least one further substitution generating enhance properties to the molecule.

[0107] The substituent transferred to the indole acceptor is in some embodiments an alkyl group, an acetyl group, a glycosyl group, a phosphate group, an oxygenyl group, a hydroxyl group or a halogenyl group.

[0108] Where the substituent is a glycosyl group the glycosyl moiety of the glycosyl group suitably comprises one or more of sugars selected from glucose, galactose, xylose, mannose, galactofuranose, arabinose, rhamnose, apiose, fucose, glucosamine, galactosamine, N-acetylglucosamine, N-acetylgalactosamine, xylosamine, mannosamine, arabinosamine, rhamnosamine, apiosamine, fucosamine, glucuronate, galacturonate, mannuronate, arabinate, apionate or a combination thereof. The substitution by a glycosyl group can suitably be an O-glycosylation, such as a β-O-glycosylation.

[0109] Where the substituent is an alkyl group, the alkyl group is suitably an ethyl or a methyl group. The alkylation reaction is suitably an O-alkylation, a N-alkylation, or a C-alkylation, optionally ethylation or methylation.

[0110] Where the substituent is an acetyl group, the acetylation reaction is suitably an N-acetylation. Examples of acetyl donors are acetyl-CoA.

[0111] The donor donating the substituent to the indole acceptor may be an aldehyde, a ketone, an ether and/or an amine.

[0112] Suitable aldehydes include acetaldehyde, oxaloacetaldehyde and/or secologanin, while suitable ketones include cinnamoyl-CoA or pyruvate.

[0113] The ether may be a glycoside, in particular a nucleotide glycoside, such as NTP-glycosides, NDP-glycosides or NMP-glycosides. In some embodiments the nucleoside of the nucleotide glycoside is selected from Uridine, Adenosin, Guanosin, Cytidin and/or deoxythymidine. In particular the nucleotide glycoside includes UDP-glycosides, ADP-glycosides, CDP-glycosides, CMP-glycosides, dTDP-glycosides and/or GDP-glycosides. Particularly useful nucleotide glycosides are UDP-D-glucose (UDP-Glc); UDP-galactose (UDP-Gal); UDP-D-xylose (UDP-Xyl); UDP-N-acetyl-D-glucosamine (UDP-GIcNAc); UDP-N-acetyl-D-galactosamine (UDP-GaINAc); UDP-D-glucuronic acid (UDP-GIcA); UDP-D-galactofuranose (UDP-Galf); UDP-arabinose; UDP-rhamnose, UDP-apiose; UDP-2-acetamido-2-deoxy-α-D-mannuronate; UDP-N-acetyl-D-galactosamine 4-sulfate; UDP-N-acetyl-D-mannosamine; UDP-2,3-bis(3-hydroxytetra-decanoyl)-glucosamine; UDP-4-deoxy-4-formamido-β-L-arabinopyranose; UDP-2,4-bis(acetamido)-2,4,6trideoxy-α-D-glucopyranose; UDP-galacturonate; UDP-3-amino-3-deoxy-α-D-glucose; guanosine diphospho-D-mannose (GDP-Man); guanosine diphospho-L-fucose (GDP-Fuc); guanosine diphospho-L-rhamnose (GDP-Rha); cytidine monophospho-N-acetylneuraminic acid (CMP-Neu5Ac); cytidine monophospho-2-keto-3-deoxy-D-mannooctanoic acid (CMP-Kdo); and ADP-glucose.

[0114] The amine may be S-Adenosyl methionine (SAM) or S-Adenosyl ethionine (SAE).

[0115] In the method of the invention the one or more enzymes is suitably includes glycosyltransferases, alkyltransferases, synthases, acetyltransferases, kinases, cinnamoyltransferases, phosphatases, laccases, halogenases, P450 enzymes, flavin monooxygenases, and/or lyases.

[0116] The glycosyltransferase of the invention may be derived from a plant, such as Oryza sativa, Crocus sativus, Nicotiana tabacum, Stevia rebaudiana, Nicotiana benthatamiana and/or Arabidopsis thaliana or from a fungus. The glycosyl transferase can be an O-glycoside transferase transferring a glycosyl group to an O of the indole acceptor and/or a C-glycoside transferase transferring a glycosyl group to a C of the indole acceptor. In some embodiments the glycosyl transferase can O-glycosylate an aglycone acceptor or a glycosylated acceptor or both. In either case the glycosyl group can be glucose, rhamnose, xylose, arabinose, N-acetylgalactosamin, or N-acetylglucosamin. In further embodiments the glycosyl transferase can transfer a monosaccharide, a disaccharide, a trisaccharide or a tetrasacharide to the indole acceptor such as an aglycone/glycoside mono-O-glycosyltransferase, di-O-glycosyltransferase, tri-O-glycosyltransferase, or tetra-O-glycosyltransferase, respectively. In a preferred embodiment the glycosyl transferase is a hydroxytryptamine glycosyltransferase. In alternative embodiments the glycosyl transferase of the invention may be selected from EC classes EC2.4.1.-, and/or EC2.4.2.-, such as EC2.4.1.17, EC2.4.1.35, EC2.4.1.159, EC2.4.1.203. EC2.4.1.234, EC2.4.1.236, EC2.4.1.294, and/or EC2.4.2.40. Examples of suitable glycosyl transferases are the glycosyl transferases comprised in SEQ ID NO: 80, 82, 84, or 86, 188, 190, 192, 194, 196, 198, 200, 202, 204, 206, 208, 210, 212, 214, 216, 218, 220, 222, 224, 226, 228, 230, 232, 234, 236, 238, 240, 242, 244, 246, 248, 250 and/or 252. The glycosyl transferase of the invention preferably has at least 70%, such at least 75%, such as at least 80%, such as at least 90%, such as at least 95%, such as at least 99%, such as 100% identity to the glycosyl transferase comprised in anyone of SEQ ID NO: 80, 82, 84, or 86, 188, 190, 192, 194, 196, 198, 200, 202, 204, 206, 208, 210, 212, 214, 216, 218, 220, 222, 224, 226, 228, 230, 232, 234, 236, 238, 240, 242, 244, 246, 248, 250 and/or 252.

[0117] In some embodiments the glycosyl transferase has at least 70%, such at least 75%, such as at least 80%, such as at least 90%, such as at least 95%, such as at least 99%, such as 100% identity to the glycosyl transferase comprised in anyone of SEQ ID NO: 194 and/or 204.

[0118] The alkyl transferase of the invention may be a methyltransferase, such as an O-methyltransferase, a N-methyltransferase or a C-methyltransferase. Suitable O-methyltransferases include those having at least 70%, such at least 75%, such as at least 80%, such as at least 90%, such as at least 95%, such as at least 99%, such as 100% identity to the O-methyltransferase comprised in anyone of SEQ ID NO: 114, 116, 118 and/or 120. Suitable N-methyltransferases include those having at least 70%, such at least 75%, such as at least 80%, such as at least 90%, such as at least 95%, such as at least 99%, such as 100% identity to the N-methyltransferase comprised in anyone of SEQ ID NO: 122, 124, 126, 128, 130, 132, 134 136 and/or 138. Suitable C-methyltransferases include those having at least 70%, such at least 75%, such as at least 80%, such as at least 90%, such as at least 95%, such as at least 99%, such as 100% identity to the C-methyltransferase comprised in SEQ ID NO: 140.

[0119] The synthase of the invention may be a Strictosidine synthase or a 1-acetyl-β-carboline synthase. Suitable Strictosidine synthases include those having at least 70%, such at least 75%, such as at least 80%, such as at least 90%, such as at least 95%, such as at least 99%, such as 100% identity to the Strictosidine synthase comprised in anyone of SEQ ID NO: 144 146, 148 and/or 150. Suitable 1-acetyl-β-carboline synthases include those having at least 70%, such at least 75%, such as at least 80%, such as at least 90%, such as at least 95%, such as at least 99%, such as 100% identity to the 1-acetyl-β-carboline synthase comprised in anyone of SEQ ID NO: 152 and/or 154.

[0120] The acetyltransferase may be an aralkylamine N-acetyltransferase including those having at least 70%, such at least 75%, such as at least 80%, such as at least 90%, such as at least 95%, such as at least 99%, such as 100% identity to the aralkylamine N-acetyltransferase comprised in SEQ ID NO: 142.

[0121] The kinase of the invention may be a 4-Hydroxytryptamine kinase and/or a 7-hydroxytryptamine kinase including those having at least 70%, such at least 75%, such as at least 80%, such as at least 90%, such as at least 95%, such as at least 99%, such as 100% identity to the 4-Hydroxytryptamine kinase and/or 7-hydroxytryptamine kinase comprised in anyone of SEQ ID NO: 156, 158, and/or 160.

[0122] The cinnamoyltransferase of the invention may be a N-hydroxycinnamoyltransferase including those having at least 70%, such at least 75%, such as at least 80%, such as at least 90%, such as at least 95%, such as at least 99%, such as 100% identity to the N-hydroxycinnamoyltransferase comprised in SEQ ID NO: 162.

[0123] The phosphatase of the invention may be a psilocybin phosphatase including those having at least 70%, such at least 75%, such as at least 80%, such as at least 90%, such as at least 95%, such as at least 99%, such as 100% identity to the psilocybin phosphatase comprised in SEQ ID NO: 164.

[0124] The laccase of the invention may be a psilocin laccase including those having at least 70%, such at least 75%, such as at least 80%, such as at least 90%, such as at least 95%, such as at least 99%, such as 100% identity to the psilocin laccase comprised in SEQ ID NO: 166.

[0125] The halogenase may be a tryptophan halogenase such as a Tryptophan 2-halogenase, a Tryptophan 5-halogenase, a Tryptophan 6-halogenase or a Tryptophan 7-halogenase. Suitable Tryptophan 2-halogenases inclide those having at least 70%, such at least 75%, such as at least 80%, such as at least 90%, such as at least 95%, such as at least 99%, such as 100% identity to the Tryptophan 2-halogenase comprised in SEQ ID NO: 168. Suitable Tryptophan 5-halogenases include those having at least 70%, such at least 75%, such as at least 80%, such as at least 90%, such as at least 95%, such as at least 99%, such as 100% identity to the Tryptophan 5-halogenase comprised in SEQ ID NO: 170. Suitable Tryptophan 6-halogenase include those having at least 70%, such at least 75%, such as at least 80%, such as at least 90%, such as at least 95%, such as at least 99%, such as 100% identity to the Tryptophan 6-halogenase comprised in SEQ ID NO: 172. Suitable Tryptophan 7-halogenase include those having at least 70%, such at least 75%, such as at least 80%, such as at least 90%, such as at least 95%, such as at least 99%, such as 100% identity to the Tryptophan 7-halogenase comprised in SEQ ID NO: 174.

[0126] The P450 enzyme of the invention include those having at least 70%, such at least 75%, such as at least 80%, such as at least 90%, such as at least 95%, such as at least 99%, such as 100% identity to the P450 enzymes comprised in anyone of SEQ ID NO: 88, 90, 92, 94, 96, 100 and/or 178 and the method can optionally further include contacting the P450 Enzymes with a P450 reductase (CPR). In particular embodiments the P450 enzyme has at least 70%, such at least 75%, such as at least 80%, such as at least 90%, such as at least 95%, such as at least 99%, such as 100% identity to the P450 enzyme comprised in SEQ ID NO:96 (OsT5H) and optionally the P450 reductase has at least 70%, such at least 75%, such as at least 80%, such as at least 90%, such as at least 95%, such as at least 99%, such as 100% identity to the P450 reductase comprised in SEQ ID NO: 112 (FoCPR).

[0127] The flavin monooxygenase of the invention include those having at least 70%, such at least 75%, such as at least 80%, such as at least 90%, such as at least 95%, such as at least 99%, such as 100% identity to the flavin monooxygenase comprised in SEQ ID NO: 98.

[0128] The lyase of the invention include those having at least 70%, such at least 75%, such as at least 80%, such as at least 90%, such as at least 95%, such as at least 99%, such as 100% identity to the lyase comprised in anyone of SEQ ID NO: 52 or 176.

[0129] The sequence identities for the above-mentioned substituting enzymes may even be at least 90%, such as at least 95%, such as at least 99%, such as 100%, such as specifically at least 99%, such as 100%.

[0130] The tryptamine derivative (I) of the invention may be a hydroxytryptamine β-O-glycoside, such as a hydroxytryptamine β-O-glucoside, including but not limited to 4-hydroxytryptamine-β-O-glycoside, Psilocin-β-O-glycoside, Norpsilocin-β-O-glycoside, 4-hydroxy-N,N,N-trimethyltryptamine-β-O-glycoside, Serotonin-β-O-glycoside, Bufotenine-β-O-glycoside, Norbufotenine-β-O-glycoside, 5-hydroxy-N,N,N-trimethyl-tryptamine-β-O-glycoside, N-acetylserotonin-β-O-glycoside, Noribogaine-β-O-glycoside, 7-OH-mitragynine-β-O-glycoside, 4-HO-DET-β-O-glycoside, 4-HO-DiPT-β-O-glycoside, 4-HO-MET-β-O-glycoside, 4-HO-MiPT-β-O-glycoside, 4-HO-McPT-β-O-glycoside, 4-HO-DPT-β-O-glycoside, 4-HO-DSBT-β-O-glycoside, and/or Harmalol-β-O-glycoside.

[0131] In further embodiments the method of the invention comprises one or more steps selected from:
[0132] a) converting an indole or indole derivative into tryptophan or a tryptophan derivative; and
[0133] b) converting tryptophan or tryptophan derivative into tryptamine or tryptamine derivative.

[0134] These steps a) and/or b) may be performed in vitro.

[0135] In particular the conversion of the indole or indole derivative into the tryptophan or tryptophan derivative may include contacting the indole or indole derivative with a tryptophan synthase enzyme, such as a tryptophan synthase which has at least 70%, such at least 75%, such as at least 80%, such as at least 90%, such as at least 95%, such as at least 99%, such as 100% identity to the tryptophan synthase comprised in SEQ ID NO: 60, 62, 64, 66, 68, 180, 182 and/or 256. In special embodiments the tryptophan synthase has at least 70%, such at least 75%, such as at least 80%, such as at least 90%, such as at least 95%, such as at least 99%, such as 100% identity to the tryptophan synthase comprised in SEQ ID NO: 256.

[0136] Further, the conversion of the tryptophan or tryptophan derivative into the tryptamine or tryptamine derivative may comprise contacting the tryptophan or tryptophan derivative with a tryptophan decarboxylase enzyme, such as a tryptophan decarboxylase which has at least 70%, such at least 75%, such as at least 80%, such as at least 90%, such as at least 95%, such as at least 99%, such as 100% identity to the tryptophan decarboxylase comprised in SEQ ID NO: 26, 70, 72, 74, 76 and/or 78. In particular embodiments the conversion of the indole or indole derivative into the tryptophan or tryptophan derivative comprises contacting the indole or indole derivative with a tryptophan synthase enzyme which has at least 70%, such at least 75%, such as at least 80%, such as at least 90%, such as at least 95%, such as at least 99%, such as 100% identity to the tryptophan synthase comprised in SEQ ID NO: 180 and/or 256 in the presence of a tryptophan decarboxylase which has at least 70%, such at least 75%, such as at least 80%, such as at least 90%, such as at least 95%, such as at least 99%, such as 100% identity to the tryptophan decarboxylase comprised in SEQ ID NO: 72 and/or 78.

[0137] In important embodiments the indole acceptor is serotonin and the tryptamine derivative (I) is a derivative of serotonin, optionally Melatonin, Normelatonin or hydroxycinnamoylserotonin such as 4-coumaroylserotonin and the one or more enzymes substituting one or more H, OH and/or COOH in the indole acceptor with one or more substituents of the substituent donor are selected from
[0138] a) an acetyl transferase which has at least 70% to the identity to the acetyl transferase comprised in SEQ ID NO: 142
[0139] b) an O-methyl transferase which has at least 70% to the identity to the O-methyl transferase comprised in SEQ ID NO: 118; and/or
[0140] c) a N-hydroxycinnamoyl transferase which has at least 70% to the identity to the Cin trans comprised in SEQ ID NO: 162.

[0141] The method of the invention can further comprise one or more additional steps selected from:
[0142] a) Glycosylation;
[0143] b) Methylation;
[0144] c) Hydroxylation;
[0145] d) Condensation;
[0146] e) Nitration;
[0147] f) Oxidation;
[0148] g) Lyase deamidation; or
[0149] h) Dephosphorylation

[0150] The hydroxylation step may comprise contacting the indole or indole derivative or tryptophan or tryptophan derivative with a hydroxylase including those having at least 70%, such at least 75%, such as at least 80%, such as at least 90%, such as at least 95%, such as at least 99%, such as 100% identity to the hydroxylase comprised in anyone of SEQ ID NO: 88, 90, 92, 94, 96, 98, and/or 100, optionally in the presence of a Cytochrome P450 reductase (CRP) which has at least 70%, such at least 75%, such as at least 80%, such as at least 90%, such as at least 95%, such as at least 99%, such as 100% identity to the CPR comprised in anyone of SEQ ID NO: 102, 104, 106, 108, 110 and/or 112.

[0151] The lyase deamidation step may comprise contacting the indole or indole derivative or tryptophan or tryptophan derivative with a lyase including those having at least 70%, such at least 75%, such as at least 80%, such as at least 90%, such as at least 95%, such as at least 99%, such as 100% identity to the lyase comprised in anyone of SEQ ID NO: 52 and/or 176.

[0152] In preferred embodiments the method comprises in vitro enzymatic substitution steps and/or optionally in vivo enzymatic substitution steps. In particular the method can comprise expressing a glycosyl transferase in E. coli and performing in vitro glycosylation of the indole acceptor.

### Tryptamine Derivatives

[0153] The invention also provides novel tryptamines derivatives resulting from performing the method of the invention. Such tryptamine derivatives include those of formula (I):

[chemical structure]

wherein at least one of R₂, R₄ to R₉, α and β is a glycosyl group, wherein particularly R₂, R4 to R₇, α and β may be an O-glycosyl group. Such tryptamine derivatives include but are not limited to 4-hydroxytryptamine-β-O-glycoside, Psilocin-β-O-glycoside, Norpsilocin-β-O-glycoside, 4-hydroxy-N,N,N-trimethyltryptamine-β-O-glycoside, Serotonin-β-O-glycoside, Bufotenine-β-O-glycoside, Norbufotenine-β-O-glycoside, 5-hydroxy-N,N,N-trimethyltryptamine-β-O-glycoside, N-acetylserotonin-β-O-glycoside, Noribogaine-β-O-glycoside, 7-OH-mitragynine-β-O-glycoside, 4-HO-DET-β-O-glycoside, 4-HO-DiPT-β-O-glycoside, 4-HO-MET-β-O-glycoside, 4-HO-MiPT-β-O-glycoside, 4-HO-McPT-β-O-glycoside, 4-HO-DPT-β-0-glycoside, 4-HO-DSBT-β-O-glycoside, and wherein the glycoside of Serotonin-β-O-glycoside, Bufotenine-β-O-glycoside, Norbufotenine-β-O-glycoside or 5-hydroxy-N,N,N-trimethyltryptamine-β-O-glycoside is not a glucoside.

### Genetically Modified Host Cells and Cell Cultures

[0154] In a further aspect of the invention the method as described, supra, is performed in a host cell genetically modified to produce tryptamine derivative of the invention. Accordingly, the present invention also provides host cells, which are genetically modified to produce the tryptamine derivative in the presence of the substitution group donor, wherein the host cell expresses one or more heterologous genes encoding the one or more substituting enzymes, which in the presence of the substitution group donor and the indole acceptor, transfers a substitution group from the donor to the acceptor and thereby produces the substituted tryptamine. Substituting enzymes and donors for performing the method in the genetically modified cell are suitably those described, supra, for the method.

[0155] The genetically modified microbial host cell suitably expresses one or more genes selected from:
[0156] a) genes encoding a UGT said genes which are at least 70%, such at least 75%, such as at least 80%, such as at least 90%, such as at least 95%, such as at least 99%, such as 100% identical to the UGT encoding polynucleotide comprised in anyone of SEQ ID NO: 79, 81, 83, 85, 187, 189, 191, 193, 195, 197, 199, 201, 203, 205, 207, 209, 211, 213, 215, 217, 219, 221, 223, 225, 227, 229, 231, 233, 235, 237, 239, 241, 243, 245, 247, 249, and/or 251 or genomic DNA thereof;
[0157] b) genes encoding an O-methyltransferase said genes which are at least 70%, such at least 75%, such as at least 80%, such as at least 90%, such as at least 95%, such as at least 99%, such as 100% identical to the O-methyltransferase encoding polynucleotide comprised in anyone of SEQ ID NO: 113, 115, 117, and/or 119 or genomic DNA thereof;
[0158] c) genes encoding an N-methyltransferase said genes which are at least 70%, such at least 75%, such as at least 80%, such as at least 90%, such as at least 95%, such as at least 99%, such as 100% identical to the N-methyltransferase encoding polynucleotide comprised in anyone of SEQ ID NO: 121, 123, 125, 127, 129, 131, 133, 135, and/or 137 or genomic DNA thereof;
[0159] d) genes encoding a C-methyltransferase said genes which are at least 70%, such at least 75%, such as at least 80%, such as at least 90%, such as at least 95%, such as at least 99%, such as 100% identical to the C-methyltransferase encoding polynucleotide comprised in SEQ ID NO: 139 or genomic DNA thereof;
[0160] e) genes encoding a strictosidine synthase said genes which are at least 70%, such at least 75%, such as at least 80%, such as at least 90%, such as at least 95%, such as at least 99%, such as 100% identical to the strictosidine synthase encoding polynucleotide comprised in anyone of SEQ ID NO: 143, 145, 147, and/or 149 or genomic DNA thereof;
[0161] f) genes encoding a 1-acetyl-β-carboline synthase said genes which are at least 70%, such at least 75%, such as at least 80%, such as at least 90%, such as at least 95%, such as at least 99%, such as 100% identical to the 1-acetyl-β-carboline synthase encoding polynucleotide comprised in anyone of SEQ ID NO: 151, and/or 153 or genomic DNA thereof;
[0162] g) genes encoding a 1-acetyl-β-carboline synthase said genes which are at least 70%, such at least 75%, such as at least 80%, such as at least 90%, such as at least 95%, such as at least 99%, such as 100% identical to the aralkylamine N-acetyltransferase encoding polynucleotide comprised in SEQ ID NO: 141 or genomic DNA thereof;
[0163] h) genes encoding a 4-Hydroxytryptamine kinase and/or a 7-hydroxytryptamine kinase said genes which are at least 70%, such at least 75%, such as at least 80%, such as at least 90%, such as at least 95%, such as at least 99%, such as 100% identical to the 4-Hydroxytryptamine kinase and/or a 7-hydroxytryptamine kinase encoding polynucleotide comprised in anyone of SEQ ID NO: 155, 157, and/or 159 or genomic DNA thereof;
[0164] i) genes encoding an N-hydroxycinnamoyltransferase said genes which are at least 70%, such at least 75%, such as at least 80%, such as at least 90%, such as at least 95%, such as at least 99%, such as 100% identical to the N-hydroxycinnamoyltransferase encoding polynucleotide comprised in SEQ ID NO: 161 or genomic DNA thereof;
[0165] j) genes encoding a psilocybin phosphatase said genes which are at least 70%, such at least 75%, such as at least 80%, such as at least 90%, such as at least 95%, such as at least 99%, such as 100% identical to the psilocybin phosphatase encoding polynucleotide comprised in SEQ ID NO: 163 or genomic DNA thereof;
[0166] k) genes encoding a psilocin laccase said genes which are at least 70%, such at least 75%, such as at least 80%, such as at least 90%, such as at least 95%, such as at least 99%, such as 100% identical to the psilocin laccase encoding polynucleotide comprised in SEQ ID NO: 165 or genomic DNA thereof;
[0167] I) genes encoding a Tryptophan 2-halogenase said genes which are at least 70%, such at least 75%, such as at least 80%, such as at least 90%, such as at least 95%, such as at least 99%, such as 100% identical to the Tryptophan 2-halogenase encoding polynucleotide comprised in SEQ ID NO: 167 or genomic DNA thereof;
[0168] m) genes encoding a Tryptophan 5-halogenase said genes which are at least 70%, such at least 75%, such as at least 80%, such as at least 90%, such as at least 95%, such as at least 99%, such as 100% identical to the Tryptophan 5-halogenase encoding polynucleotide comprised in SEQ ID NO: 169 or genomic DNA thereof;
[0169] n) genes encoding a Tryptophan 6-halogenase said genes which are at least 70%, such at least 75%, such as at least 80%, such as at least 90%, such as at least 95%, such as at least 99%, such as 100% identical to the Tryptophan 6-halogenase encoding polynucleotide comprised in SEQ ID NO: 171 or genomic DNA thereof;
[0170] o) genes encoding a Tryptophan 7-halogenase said genes which are at least 70%, such at least 75%, such as at least 80%, such as at least 90%, such as at least 95%, such as at least 99%, such as 100% identical to the Tryptophan 7-halogenase encoding polynucleotide comprised in SEQ ID NO: 173 or genomic DNA thereof;
[0171] p) genes encoding a P450 enzyme said genes which are at least 70%, such at least 75%, such as at least 80%, such as at least 90%, such as at least 95%, such as at least 99%, such as 100% identical to the P450 enzyme encoding polynucleotide comprised in anyone of SEQ ID NO: 87, 89, 91, 93, 95, 99, and/or 177 or genomic DNA thereof;
[0172] q) genes encoding a P450 reductase said genes which are at least 70%, such at least 75%, such as at least 80%, such as at least 90%, such as at least 95%, such as at least 99%, such as 100% identical to the P450 reductase (CPR) encoding polynucleotide comprised in anyone of SEQ ID NO: 101, 103, 105, 107, 109, and/or 111 or genomic DNA thereof;
[0173] r) genes encoding a flavin monooxygenase said genes which are at least 70%, such at least 75%, such as at least 80%, such as at least 90%, such as at least 95%, such as at least 99%, such as 100% identical to the flavin monooxygenase encoding polynucleotide comprised in SEQ ID NO: 97 or genomic DNA thereof; and/or
[0174] s) genes encoding a lyase said genes which are at least 70%, such at least 75%, such as at least 80%, such as at least 90%, such as at least 95%, such as at least 99%, such as 100% identical to the lyase encoding polynucleotide comprised in anyone of SEQ ID NO: 51 and/or 175 or genomic DNA thereof.

[0175] The host cell of the invention may further comprise an operative biosynthetic pathway producing the indole acceptor, wherein the host cell expresses one or more pathway genes encoding polypeptides selected from:
[0176] a) one or more enzymes converting glucose to fructose-6-phosphate;
[0177] b) a fructose-6-phosphate phosphoketolase converting fructose-6-phosphate to Erythrose-4-phosphate and acetyl phosphate;
[0178] c) a Phosphotransacetylase converting Acetyl phosphate to Acetyl-CoA;
[0179] d) one or more enzymes converting Fructose-6-phosphate to Phosphoenolpyruvate;
[0180] e) a 3-deoxy-D-arabino-heptulosonate 7-phosphate synthase (DAHP synthase) converting Phosphoenolpyruvate and Erythrose-4-phosphate to 3-deoxy-D-arabino-heptulosonate-7-phosphate (DAHP);
[0181] f) one or more enzymes converting 3-deoxy-D-arabino-heptulosonate-7-phosphate to 5-enolpyruvoyl-shikimate 3-phosphate;
[0182] g) a Shikimate kinase converting Shikimate to Shikimate-3-phosphate;
[0183] h) a Chorismate synthase converting 5-enolpyruvoyl-shikimate 3-phosphate to Chorismate;
[0184] i) a Anthranilate synthase converting Chorismate to Anthranilate;
[0185] j) a Ribose-phosphate pyrophosphokinase converting Ribose-5-phosphate to Phospho-alpha-D-ribosyl-1-pyrophosphate;
[0186] k) a Anthranilate phosphoribosyl transferase converting Anthranilate and Phospho-alpha-D-ribosyl-1-pyrophosphate to N-(5-phosphoribosyl)-anthranilate;
[0187] l) a N-(5′-phosphoribosyl)-anthranilate isomerase converting N-(5-phosphoribosyl)-anthranilate to 1-(o-carboxyphenylamino)-1′-deoxyribulose 5′-phosphate;
[0188] m) a Indole-3-glycerol phosphate synthase converting 1-(o-carboxyphenylamino)-1′-deoxyribulose 5′-phosphate to (1S,2R)-1-C-(indol-3-yl)-glycerol 3-phosphate;
[0189] n) a Tryptophan synthase converting (1S,2R)-1-C-(indol-3-yl) glycerol 3-phosphate and Serine to L-Tryptophan;
[0190] o) a Tryptophan decarboxylase converting L-Tryptophan to Tryptamine;
[0191] p) a Chorismate mutase converting Chorismate to Prephenate;
[0192] q) a Prephenate dehydrogenase converting Prephenate to Phenylpyruvate;
[0193] r) an Aromatic aminotransferase converting Phenylpyruvate to phenylalanine;
[0194] s) a Phenylalanine ammonium lyase converting Phenylalanine to cinnamate;
[0195] t) a Cinnamate 4-hydroxylase converting Cinnamate to coumarate;
[0196] u) a cytochrome b5 assisting Cytochrome P450 reductases reducing hydroxylase enzymes;
[0197] v) a Cytochrome P450 reductase reducing cytochrome P450 enzymes;
[0198] w) a 4-Coumoryl-CoA ligase converting Coumarate to 4-coumoryl CoA;
[0199] x) a Tryptophanase converting tryptophan or a derivative thereof into indole or a derivative thereof;
[0200] y) a Tryptophan synthase converting Indole or a derivative thereof and Serine or a derivative thereof into Tryptophan or a derivative thereof;
[0201] z) a Tryptophan decarboxylase or a non-canonical aromatic amino acid decarboxylase converting Tryptophan or a derivative thereof into Tryptamine or a derivative thereof;
[0202] aa) a Tryptamine 5-hydroxylase converting tryptamine to serotonin;
[0203] bb) a Tryptamine 4-hydroxylase converting tryptamine to 4-hydroxytryptamine.
[0204] cc) 4-hydroxytryptamine kinase converting 4-hydroxytryptamine to Norbaeocystin; and/or
[0205] dd) Psilocybin synthase converting Norbaeocystin to Psilocybin.

[0206] In some embodiments of the host cell the corresponding:
[0207] a) fructose-6-phosphate phosphoketolase has at least 70%, such at least 75%, such as at least 80%, such as at least 90%, such as at least 95%, such as at least 99%, such as 100% identity to the fructose-6-phosphate phosphoketolase comprised in SEQ ID NO: 2;
[0208] b) Phosphotransacetylase has at least 70%, such at least 75%, such as at least 80%, such as at least 90%, such as at least 95%, such as at least 99%, such as 100% identity to the Phosphotransacetylase comprised in SEQ ID NO: 4;
[0209] c) 3-deoxy-D-arabino-heptulosonate 7-phosphate synthase has at least 70%, such at least 75%, such as at least 80%, such as at least 90%, such as at least 95%, such as at least 99%, such as 100% identity to the 3-deoxy-D-arabino-heptulosonate 7-phosphate synthase comprised in SEQ ID NO: 6;
[0210] d) Enzyme converting 3-deoxy-D-arabino-heptulosonate-7-phosphate to 5-enolpyruvoyl-shikimate 3-phosphate has at least 70%, such at least 75%, such as at least 80%, such as at least 90%, such as at least 95%, such as at least 99%, such as 100% identity to the Enzyme comprised in SEQ ID NO: 8;
[0211] e) Shikimate kinase has at least 70%, such at least 75%, such as at least 80%, such as at least 90%, such as at least 95%, such as at least 99%, such as 100% identity to the Shikimate kinase comprised in SEQ ID NO: 10;
[0212] f) Chorismate synthase has at least 70%, such at least 75%, such as at least 80%, such as at least 90%, such as at least 95%, such as at least 99%, such as 100% identity to the Chorismate synthase comprised in SEQ ID NO: 12;
[0213] g) Anthranilate synthase has at least 70%, such at least 75%, such as at least 80%, such as at least 90%, such as at least 95%, such as at least 99%, such as 100% identity to the Anthranilate synthase comprised in SEQ ID NO: 14;
[0214] h) Ribose-phosphate pyrophosphokinase has at least 70%, such at least 75%, such as at least 80%, such as at least 90%, such as at least 95%, such as at least 99%, such as 100% identity to the Ribose-phosphate pyrophosphokinase comprised in SEQ ID NO: 16;
[0215] i) Anthranilate phosphoribosyl transferase has at least 70%, such at least 75%, such as at least 80%, such as at least 90%, such as at least 95%, such as at least 99%, such as 100% identity to the Anthranilate phosphoribosyl transferase comprised in SEQ ID NO: 18;
[0216] j) N-(5′-phosphoribosyl)-anthranilate isomerase has at least 70%, such at least 75%, such as at least 80%, such as at least 90%, such as at least 95%, such as at least 99%, such as 100% identity to the N-(5′-phosphoribosyl)-anthranilate isomerase comprised in SEQ ID NO: 20;
[0217] k) Indole-3-glycerol phosphate synthase has at least 70%, such at least 75%, such as at least 80%, such as at least 90%, such as at least 95%, such as at least 99%, such as 100% identity to the Indole-3-glycerol phosphate synthase comprised in SEQ ID NO: 22;
[0218] l) Tryptophan synthase has at least 70%, such at least 75%, such as at least 80%, such as at least 90%, such as at least 95%, such as at least 99%, such as 100% identity to the Tryptophan synthase comprised in anyone of SEQ ID NO: 24, 60, 62, 64, 66, 68, 180 and/or 182;
[0219] m) Tryptophan decarboxylase or a non-canonical aromatic amino acid decarboxylase has at least 70%, such at least 75%, such as at least 80%, such as at least 90%, such as at least 95%, such as at least 99%, such as 100% identity to the Tryptophan decarboxylase or a non-canonical aromatic amino acid decarboxylase comprised in anyone of SEQ ID NO: 26, 70, 72, 74, 76, and/or 78;
[0220] n) Chorismate mutase has at least 70%, such at least 75%, such as at least 80%, such as at least 90%, such as at least 95%, such as at least 99%, such as 100% identity to the Chorismate mutase comprised in SEQ ID NO: 46;
[0221] o) Prephenate dehydrogenase has at least 70%, such at least 75%, such as at least 80%, such as at least 90%, such as at least 95%, such as at least 99%, such as 100% identity to the Prephenate dehydrogenase comprised in SEQ ID NO: 48;
[0222] p) Aromatic aminotransferase has at least 70%, such at least 75%, such as at least 80%, such as at least 90%, such as at least 95%, such as at least 99%, such as 100% identity to the Aromatic aminotransferase comprised in SEQ ID NO: 50;
[0223] q) Phenylalanine ammonium lyase has at least 70%, such at least 75%, such as at least 80%, such as at least 90%, such as at least 95%, such as at least 99%, such as 100% identity to the Phenylalanine ammonium lyase comprised in SEQ ID NO: 52;
[0224] r) Cinnamate 4-hydroxylase has at least 70%, such at least 75%, such as at least 80%, such as at least 90%, such as at least 95%, such as at least 99%, such as 100% identity to the Cinnamate 4-hydroxylase comprised in SEQ ID NO: 54;
[0225] s) cytochrome b5 has at least 70%, such at least 75%, such as at least 80%, such as at least 90%, such as at least 95%, such as at least 99%, such as 100% identity to the cytochrome b5 comprised in SEQ ID NO: 254;
[0226] t) Cytochrome P450 reductase has at least 70%, such at least 75%, such as at least 80%, such as at least 90%, such as at least 95%, such as at least 99%, such as 100% identity to the Cytochrome P450 reductase comprised in SEQ ID NO: 56, 102, 104, 106, 108, 110 and/or 112;
[0227] u) 4-Coumoryl-CoA ligase has at least 70%, such at least 75%, such as at least 80%, such as at least 90%, such as at least 95%, such as at least 99%, such as 100% identity to the 4-Coumoryl-CoA ligase comprised in SEQ ID NO: 58;
[0228] v) Tryptamine 5-hydroxylase has at least 70%, such at least 75%, such as at least 80%, such as at least 90%, such as at least 95%, such as at least 99%, such as 100% identity to the 5-hydroxylase comprised in SEQ ID NO: 96;
[0229] w) Typtamine 4-hydroxylase has at least 70%, such at least 75%, such as at least 80%, such as at least 90%, such as at least 95%, such as at least 99%, such as 100% identity to the Tryptamine 4-hydroxylase comprised in SEQ ID NO 94:
[0230] x) 4-hydroxytryptamine kinase has at least 70%, such at least 75%, such as at least 80%, such as at least 90%, such as at least 95%, such as at least 99%, such as 100% identity to the 4-hydroxytryptamine kinase comprised in SEQ ID NO: 160; and/or
[0231] y) Psilocybin synthase has at least 70%, such at least 75%, such as at least 80%, such as at least 90%, such as at least 95%, such as at least 99%, such as 100% identity to the Psilocybin synthase comprised in SEQ ID NO: 128.

[0232] In other embodiments of the host cell the one or more expressed genes are selected from:
[0233] a) genes encoding a fructose-6-phosphate phosphoketolase said genes being at least 70%, such at least 75%, such as at least 80%, such as at least 90%, such as at least 95%, such as at least 99%, such as 100% identical to the fructose-6-phosphate phosphoketolase encoding polynucleotide comprised in SEQ ID NO: 1 or genomic DNA thereof;
[0234] b) genes encoding a Phosphotransacetylase said genes being at least 70%, such at least 75%, such as at least 80%, such as at least 90%, such as at least 95%, such as at least 99%, such as 100% identical to the Phosphotransacetylase encoding polynucleotide comprised in SEQ ID NO: 3 or genomic DNA thereof;
[0235] c) genes encoding a 3-deoxy-D-arabino-heptulosonate 7-phosphate synthase said genes being at least 70%, such at least 75%, such as at least 80%, such as at least 90%, such as at least 95%, such as at least 99%, such as 100% identical to the 3-deoxy-D-arabino-heptulosonate 7-phosphate synthase encoding polynucleotide comprised in SEQ ID NO: 5 or genomic DNA thereof;
[0236] d) genes encoding an enzyme converting 3-deoxy-D-arabino-heptulosonate-7-phosphate to 5-enolpyruvoyl-shikimate 3-phosphate said genes being at least 70%, such at least 75%, such as at least 80%, such as at least 90%, such as at least 95%, such as at least 99%, such as 100% identical to the polynucleotide encoding the enzyme converting 3-deoxy-D-arabino-heptulosonate-7-phosphate to 5-enolpyruvoyl-shikimate 3-phosphate comprised in SEQ ID NO: 7 or genomic DNA thereof;
[0237] e) genes encoding a Shikimate kinase said genes being at least 70%, such at least 75%, such as at least 80%, such as at least 90%, such as at least 95%, such as at least 99%, such as 100% identical to the Shikimate kinase encoding polynucleotide comprised in SEQ ID NO: 9 or genomic DNA thereof;
[0238] f) genes encoding a Shikimate kinase said genes being at least 70%, such at least 75%, such as at least 80%, such as at least 90%, such as at least 95%, such as at least 99%, such as 100% identical to the Chorismate synthase encoding polynucleotide comprised in SEQ ID NO: 11 or genomic DNA thereof;
[0239] g) genes encoding a Anthranilate synthase said genes being at least 70%, such at least 75%, such as at least 80%, such as at least 90%, such as at least 95%, such as at least 99%, such as 100% identical to the Anthranilate synthase encoding polynucleotide comprised in SEQ ID NO: 13 or genomic DNA thereof;
[0240] h) genes encoding a Ribose-phosphate pyrophosphokinase said genes being at least 70%, such at least 75%, such as at least 80%, such as at least 90%, such as at least 95%, such as at least 99%, such as 100% identical to the Ribose-phosphate pyrophosphokinase encoding polynucleotide comprised in SEQ ID NO: 15 or genomic DNA thereof;
[0241] i) genes encoding a anthranilate phosphoribosyl transferase said genes being at least 70%, such at least 75%, such as at least 80%, such as at least 90%, such as at least 95%, such as at least 99%, such as 100% identical to the Anthranilate phosphoribosyl transferase encoding polynucleotide comprised in SEQ ID NO: 17 or genomic DNA thereof;
[0242] j) genes encoding a N-(5′-phosphoribosyl)-anthranilate isomerase said genes being at least 70%, such at least 75%, such as at least 80%, such as at least 90%, such as at least 95%, such as at least 99%, such as 100% identical to the N-(5′-phosphoribosyl)-anthranilate isomerase encoding polynucleotide comprised in SEQ ID NO: 19 or genomic DNA thereof;
[0243] k) genes encoding a Indole-3-glycerol phosphate synthase said genes being at least 70%, such at least 75%, such as at least 80%, such as at least 90%, such as at least 95%, such as at least 99%, such as 100% identical to the Indole-3-glycerol phosphate synthase encoding polynucleotide comprised in SEQ ID NO: 21 or genomic DNA thereof;
[0244] l) genes encoding a Tryptophan synthase said genes being at least 70%, such at least 75%, such as at least 80%, such as at least 90%, such as at least 95%, such as at least 99%, such as 100% identical to the Tryptophan synthase encoding polynucleotide comprised in anyone of SEQ ID NO: 23, 59, 61, 63, 65, 67, 179, and/or 181 or genomic DNA thereof;
[0245] m) genes encoding a Tryptophan decarboxylase, or a non-canonical aromatic amino acid decarboxylase said genes being at least 70%, such at least 75%, such as at least 80%, such as at least 90%, such as at least 95%, such as at least 99%, such as 100% identical to the Tryptophan decarboxylase or a non-canonical aromatic amino acid decarboxylase encoding polynucleotide comprised in SEQ ID NO: 25, 69, 71, 73, 75, and/or 77 or genomic DNA thereof;
[0246] n) genes encoding a Chorismate mutase said genes being at least 70%, such at least 75%, such as at least 80%, such as at least 90%, such as at least 95%, such as at least 99%, such as 100% identical to the Chorismate mutase encoding polynucleotide comprised in SEQ ID NO: 45 or genomic DNA thereof;
[0247] o) genes encoding a Prephenate dehydrogenase said genes being at least 70%, such at least 75%, such as at least 80%, such as at least 90%, such as at least 95%, such as at least 99%, such as 100% identical to the Prephenate dehydrogenase encoding polynucleotide comprised in SEQ ID NO: 47 or genomic DNA thereof;
[0248] p) genes encoding an aromatic aminotransferase said genes being at least 70%, such at least 75%, such as at least 80%, such as at least 90%, such as at least 95%, such as at least 99%, such as 100% identical to the Aromatic aminotransferase encoding polynucleotide comprised in SEQ ID NO: 49 or genomic DNA thereof;
[0249] q) genes encoding a Phenylalanine ammonium lyase said genes being at least 70%, such at least 75%, such as at least 80%, such as at least 90%, such as at least 95%, such as at least 99%, such as 100% identical to the Phenylalanine ammonium lyase encoding polynucleotide comprised in SEQ ID NO: 51 or genomic DNA thereof;
[0250] r) genes encoding a cinnamate 4-hydroxylase said genes being at least 70%, such at least 75%, such as at least 80%, such as at least 90%, such as at least 95%, such as at least 99%, such as 100% identical to the Cinnamate 4-hydroxylase encoding polynucleotide comprised in SEQ ID NO: 53 or genomic DNA thereof;
[0251] s) genes encoding a cytochrome b5 said genes being at least 70%, such at least 75%, such as at least 80%, such as at least 90%, such as at least 95%, such as at least 99%, such as 100% identical to the C cytochrome b5 encoding polynucleotide comprised in SEQ ID NO: 253 or genomic DNA thereof;
[0252] t) genes encoding a Cytochrome P450 reductase said genes being at least 70%, such at least 75%, such as at least 80%, such as at least 90%, such as at least 95%, such as at least 99%, such as 100% identical to the Cytochrome P450 reductase encoding polynucleotide comprised in SEQ ID NO: 55, 101, 103, 105, 107, 109 and/or 111 or genomic DNA thereof;
[0253] u) genes encoding a 4-Coumoryl-CoA ligase said genes being at least 70%, such at least 75%, such as at least 80%, such as at least 90%, such as at least 95%, such as at least 99%, such as 100% identical to the 4-Coumoryl-CoA ligase encoding polynucleotide comprised in SEQ ID NO: 57 or genomic DNA thereof;
[0254] v) genes encoding a Tryptamine 5-hydroxylase said genes being at least 70% identical to the Tryptamine 5-hydroxylase encoding polynucleotide comprised in SEQ ID NO: 96 or genomic DNA thereof;
[0255] w) genes encoding a Cytochrome p450 reductase said genes being at least 70% identical to the Cytochrome p450 reductase encoding polynucleotide comprised in SEQ ID NO: 111 or genomic DNA thereof.
[0256] x) genes encoding a 4-hydroxytryptamine kinase said genes being at least 70% identitical to the 4-hydroxytryptamine kinase encoding polynucleotide comprised SEQ ID NO 159; and/or y) genes encoding a psilocybin synthase said genes being at least 70% identitical to the psilocybin synthase encoding polynucleotide comprised in SEQ ID NO 127.

[0257] In a preferred embodiment the host cell of the invention further expresses:
[0258] a) genes encoding a Psilocybin synthase said genes which are at least 70%, such at least 75%, such as at least 80%, such as at least 90%, such as at least 95%, such as at least 99%, such as 100% identical to the Psilocybin synthase encoding polynucleotide comprised in anyone of SEQ ID NO: 127 and/or 123 or genomic DNA thereof;
[0259] b) genes encoding a 4-Hydroxytryptamine kinase said genes which are at least 70%, such at least 75%, such as at least 80%, such as at least 90%, such as at least 95%, such as at least 99%, such as 100% identical to the 4-Hydroxytryptamine kinase encoding polynucleotide comprised in anyone of SEQ ID NO: 159 or genomic DNA thereof;
[0260] c) genes encoding a P450 reductase said genes which are at least 70%, such at least 75%, such as at least 80%, such as at least 90%, such as at least 95%, such as at least 99%, such as 100% identical to the P450 reductase (CPR) encoding polynucleotide comprised in SEQ ID NO: 105 and/or 101 or genomic DNA thereof;
[0261] d) genes encoding a P450 enzyme said genes which are at least 70%, such at least 75%, such as at least 80%, such as at least 90%, such as at least 95%, such as at least 99%, such as 100% identical to the P450 enzyme encoding polynucleotide comprised in SEQ ID NO: 93 and/or 87 or genomic DNA thereof; and
[0262] e) genes encoding a Tryptophan decarboxylase said genes being at least 70%, such at least 75%, such as at least 80%, such as at least 90%, such as at least 95%, such as at least 99%, such as 100% identical to the Tryptophan decarboxylase encoding polynucleotide comprised in SEQ ID NO: 77 and/or 71 or genomic DNA thereof.

[0263] The host cell may comprise at least two copies of the one or more of the heterologous genes encoding the one or more substituting enzymes or pathway enzymes and such genes may also be overexpressed. The host cell may also be modified to provide an increased amount of a substrate for at least one enzyme of the indole acceptor pathway. Still further the host cell may be further genetically modified to exhibit increased tolerance towards one or more substrates, intermediates, or product molecules from the indole acceptor pathway.

[0264] The host cell of the invention is suitably a eukaryotic, prokaryotic or archaic cell. The eukaryote cell is preferably mammalian, insect, plant, or fungal. Fungal host cells include those from phylas Ascomycota, Basidiomycota, Neocallimastigomycota, Glomeromycota, Blastocladiomycota, Chytridiomycota, Zygomycota, Oomycota and Microsporidia. The fungal host cell may be a yeast selected from ascosporogenous yeast (Endomycetales), basidiosporogenous yeast, and Fungi Imperfecti yeast (Blastomycetes). More specifically the yeast host cell is from the genera of Saccharomyces, Kluveromyces, Candida, Pichia, Debaromyces, Hansenula, Yarrowia, Zygosaccharomyces, or Schizosaccharomyces. Even more specifically the yeast host cell is from the species of Kluyveromyces lactis, Saccharomyces carlsbergensis, Saccharomyces cerevisiae, Saccharomyces diastaticus, Saccharomyces douglasii, Saccharomyces kluyveri, Saccharomyces norbensis, Saccharomyces oviformis, Saccharomyces boulardii or Yarrowia lipolytica. The fungal host cell amy also be a filamentous fungus, including those from the phylas consisting of Ascomycota, Eumycota and Oomycota. More specifically the filamentous fungal host cell can be from the genera consisting of Acremonium, Aspergillus, Aureobasidium, Bjerkandera, Ceriporiopsis, Chrysosporium, Coprinus, Corio/us, Cryptococcus, Filibasidium, Fusarium, Humicola, Magnaporthe, Mucor, Myceliophthora, Neocallimastix, Neurospora, Paecilomyces, Penicillium, Phanerochaete, Phlebia, Piromyces, Pleurotus, Schizophyllum, Talaromyces, Thermoascus, Thielavia, Tolypocladium, Trametes, and Trichoderma. Even more specifically the filamentous fungal host cell is from the species consisting of Aspergillus awamori, Aspergillus foetidus, Aspergillus fumigatus, Aspergillus japonicus, Aspergillus nidulans, Aspergillus niger, Aspergillus oryzae, Bjerkandera adusta, Ceriporiopsis aneirina, Ceriporiopsis caregiea, Ceriporiopsis gilvescens, Ceriporiopsis pannocinta, Ceriporiopsis rivulosa, Ceriporiopsis subrufa, Ceriporiopsis subvermispora, Chrysosporiuminops, Chrysosporiumkeratinophilum, Chrysosporium lucknowense, Chrysosporium merdarium, Chrysosporium pannicola, Chrysosporium queenslandicum, Chrysosporium tropicum, Chrysosporium zonatum, Coprinus cinereus, Coriolus hirsutus, Fusarium bactridioides, Fusarium cerealis, Fusarium crookwellense, Fusarium culmorum, Fusarium graminearum, Fusarium graminum, Fusarium heterosporum, Fusarium negundi, Fusarium oxysporum, Fusarium reticulatum, Fusarium roseum, Fusarium sambucinum, Fusarium sarcochroum, Fusarium sporotrichioides, Fusarium sulphureum, Fusarium torulosum, Fusarium trichothecioides, Fusarium venenatum, Humicola insolens, Humicola lanuginosa, Mucor miehei, Myceliophthora thermophila, Neurospora crassa, Penicillium purpurogenum, Phanerochaete chrysosporium, Phlebia radiata, Pleurotus eryngii, Thielavia terrestris, Trametes villosa, Trametes versicolor, Trichoderma harzianum, Trichoderma koningii, Trichoderma longibrachiatum, Trichoderma reesei, and Trichoderma viride. Alternatively, the host cell is a prokaryotic cell, such as E. coli or an archaic cell, such as an algae.

[0265] In important embodiments one or more native genes of the host may be attenuated, disrupted and/or deleted to optimize the production of the indole acceptor and/or the tryptamine derivative.

[0266] Particular target genes for being attenuated, disrupted and/or deleted are those encoding phosphatase shunting psilocybin to psilocin.

[0267] Where the host cell is a yeast strain it may suitably be modified by attenuating, disrupting and/or deleting one or more native genes selected from:
[0268] a) The pyruvate kinase gene comprised in anyone of SEQ ID NO: 27 or any of its paralogs or orthologs having at least 70%, such at least 75%, such as at least 80%, such as at least 90%, such as at least 95%, such as at least 99%, such as 100% identity to SEQ ID NO: 27;
[0269] b) The phosphofructokinase gene comprised in anyone of SEQ ID NO: 29 or 31 or any of its paralogs or orthologs having at least 70%, such at least 75%, such as at least 80%, such as at least 90%, such as at least 95%, such as at least 99%, such as 100% identity to anyone of SEQ ID NO: 29 or 31;
[0270] c) The transporters gene comprised in SEQ ID NO: 33 or any of its paralogs or orthologs having at least 70%, such at least 75%, such as at least 80%, such as at least 90%, such as at least 95%, such as at least 99%, such as 100% identity to SEQ ID NO: 33;
[0271] d) The DL-glycerol-3-phosphate phosphatase gene comprised in SEQ ID NO: 34 or any of its paralogs or orthologs having at least 70%, such at least 75%, such as at least 80%, such as at least 90%, such as at least 95%, such as at least 99%, such as 100% identity to SEQ ID NO: 34;
[0272] e) The tryptophan 2,3-dioxygenase gene comprised in SEQ ID NO: 35 or any of its paralogs or orthologs having at least 70%, such at least 75%, such as at least 80%, such as at least 90%, such as at least 95%, such as at least 99%, such as 100% identity to SEQ ID NO: 35;
[0273] f) The cystathionine beta-synthase gene comprised in SEQ ID NO: 36 or any of its paralogs or orthologs having at least 70%, such at least 75%, such as at least 80%, such as at least 90%, such as at least 95%, such as at least 99%, such as 100% identity to SEQ ID NO: 36;
[0274] g) The phenylpyruvate decarboxylase gene comprised in SEQ ID NO: 37 or any of its paralogs or orthologs having at least 70%, such at least 75%, such as at least 80%, such as at least 90%, such as at least 95%, such as at least 99%, such as 100% identity to SEQ ID NO: 37;
[0275] h) The pyruvate decarboxylase gene comprised in SEQ ID NO: 38 or any of its paralogs or orthologs having at least 70%, such at least 75%, such as at least 80%, such as at least 90%, such as at least 95%, such as at least 99%, such as 100% identity to SEQ ID NO: 38;
[0276] i) The histone variant H2AZ gene comprised in SEQ ID NO: 39 or any of its paralogs or orthologs having at least 70%, such at least 75%, such as at least 80%, such as at least 90%, such as at least 95%, such as at least 99%, such as 100% identity to SEQ ID NO: 39;
[0277] j) The phosphatase gene comprised in SEQ ID NO: 40 or any of its paralogs or orthologs having at least 70%, such at least 75%, such as at least 80%, such as at least 90%, such as at least 95%, such as at least 99%, such as 100% identity to SEQ ID NO: 40;
[0278] k) The repressible acid phosphatase gene comprised in anyone of SEQ ID NO: 41, 42, or 43 or any of its paralogs or orthologs having at least 70%, such at least 75%, such as at least 80%, such as at least 90%, such as at least 95%, such as at least 99%, such as 100% identity to anyone of SEQ ID NO: 41, 42, or 43;
[0279] l) The constitutively expressed acid phosphatase gene comprised in SEQ ID NO: 44 or any of its paralogs or orthologs having at least 70%, such at least 75%, such as at least 80%, such as at least 90%, such as at least 95%, such as at least 99%, such as 100% identity to SEQ ID NO: 44;
[0280] m) The sterol reductase gene comprised in SEQ ID NO: 183 or any of its paralogs or orthologs having at least 70%, such at least 75%, such as at least 80%, such as at least 90%, such as at least 95%, such as at least 99%, such as 100% identity to SEQ ID NO: 183; and/or
[0281] n) The S-adenosylmethionine decarboxylase gene comprised in SEQ ID NO: 184 or any of its paralogs or orthologs having at least 70%, such at least 75%, such as at least 80%, such as at least 90%, such as at least 95%, such as at least 99%, such as 100% identity to SEQ ID NO: 184.

[0282] Where the host cell is a yeast strain it may also suitably be modified to overexpress one or more native genes selected from the NADH kinase gene comprised in SEQ ID NO: 185 or any of its paralogs or orthologs having at least 70%, such at least 75%, such as at least 80%, such as at least 90%, such as at least 95%, such as at least 99%, such as 100% identity to SEQ ID NO: 185.

[0283] The invention also provides a cell culture, comprising host cell of the invention and a growth medium. Suitable growth mediums for host cells such as plant cell lines, filamentous fungi and/or yeast are known in the art.

### Nucleotide Constructs

[0284] In a further aspect the invention provides a polynucleotide construct comprising a polynucleotide sequence encoding the of the invention, operably linked to one or more control sequences heterologous to the substituting enzyme encoding polynucleotide.

[0285] Polynucleotides may be manipulated in a variety of ways to allow expression of a polypeptide. Manipulation of the polynucleotide prior to its insertion into an expression vector may be desirable or necessary depending on the expression vector. The techniques for modifying polynucleotides utilizing recombinant DNA methods are well known in the art.

[0286] The control sequence may be a promoter, which is a polynucleotide that is recognized by a host cell for expression of a polynucleotide. The promoter contains transcriptional control sequences that mediate the expression of the polypeptide. The promoter may be any polynucleotide that shows transcriptional activity in the host cell including mutant, truncated, and hybrid promoters, and may be obtained from genes encoding extracellular or intracellular polypeptides either homologous or heterologous to the host cell. The promoter may be an inducible promoter. Useful promotors for expression e.g. in fungi including yeast are known in the art.

[0287] The control sequence may also be a transcription terminator, which is recognized by a host cell to terminate transcription. The terminator is operably linked to the 3′-terminus of the polynucleotide encoding the polypeptide. Any terminator that is functional in the host cell may be used. Useful terminators for expression e.g. in fungi including yeast are known in the art.

[0288] The control sequence may also be an mRNA stabilizer region downstream of a promoter and upstream of the coding sequence of a gene which increases expression of the gene.

[0289] The control sequence may also be a leader, a non-translated region of an mRNA that is important for translation by the host cell. The leader is operably linked to the 5′-terminus of the polynucleotide encoding the polypeptide. Any leader that is functional in the host cell may be used. Useful leaders for expression e.g. in fungi including yeast are known in the art.

[0290] The control sequence may also be a polyadenylation sequence; a sequence operably linked to the 3′-terminus of the polynucleotide and, when transcribed, is recognized by the host cell as a signal to add polyadenosine residues to transcribed mRNA. Any polyadenylation sequence that is functional in the host cell may be used. Useful polyadenylation sequences for expression e.g. in fungi including yeast are known in the art.

[0291] It may also be desirable to add regulatory sequences that regulate expression of the polypeptide relative to the growth of the host cell. Examples of regulatory systems are those that cause expression of the gene to be turned on or off in response to a chemical or physical stimulus, including the presence of a regulatory compound.

[0292] In a further aspect the invention provides an expression vector comprising the polynucleotide construct of the invention. Various nucleotide sequences in addition to the polynucleotide construct of the invention may be joined together to produce a recombinant expression vector, which may include one or more convenient restriction sites to allow for insertion or substitution of the polynucleotide sequence encoding the relevant polypeptide at such sites. The recombinant expression vector may be any vector (e.g., a plasmid or virus or chromosome) that can be conveniently subjected to recombinant DNA procedures and can bring about expression of the relevant polypeptide encoding polynucleotide.

[0293] The choice of the vector will typically depend on the compatibility of the vector with the host cell into which the vector is to be introduced. The vector may be a linear or closed circular plasmid. The vector may be an autonomously replicating vector, i.e., a vector that exists as an extrachromosomal entity, the replication of which is independent of chromosomal replication, e.g., a plasmid, an extrachromosomal element, a mini-chromosome, or an artificial chromosome. The vector may contain any means for assuring self-replication. Alternatively, the nucleotide construct may, when introduced into the host cell, integrate into the genome, and replicate together with the chromosome(s) into which it has been integrated. Furthermore, a single vector or plasmid or two or more vectors or plasmids that together contain the total DNA to be introduced into the genome of the host cell, or a transposon, may be used. The vector may contain one or more selectable markers that permit easy selection of transformed, transfected, transduced, or the like cells. A selectable marker is a gene from which the product provides for biocide or viral resistance, resistance to heavy metals, prototrophy to auxotrophs, and the like.

[0294] The vector preferably contains element(s) that permits integration of the vector into the host cell's genome or permits autonomous replication of the vector in the cell independent of the genome. For integration into the host cell genome, the vector may rely on the polynucleotide encoding the polypeptide or any other element of the vector for integration into the genome by homologous or non-homologous recombination. Alternatively, the vector may contain additional polynucleotides for directing integration by homologous recombination into the genome of the host cell at precise location(s) in the chromosome(s). To increase the likelihood of integration at a precise location, the integrational elements should contain a sufficient number of nucleic acids, such as 35 to 10,000 base pairs, such as 100 to 10,000 base pairs, such as 400 to 10,000 base pairs, and such as 800 to 10,000 base pairs, which have a high degree of sequence identity to the corresponding target sequence to enhance the probability of homologous recombination. The integrational elements may be any sequence that is homologous with the target sequence in the genome of the host cell. Furthermore, the integrational elements may be non-encoding or encoding polynucleotides. On the other hand, the vector may be integrated into the genome of the host cell by non-homologous recombination.

[0295] The origin of replication may be any plasmid replicator mediating autonomous replication that functions in a cell. The term “origin of replication” or “plasmid replicator” refers to a polynucleotide that enables a plasmid or vector to replicate in vivo.

[0296] More than one copy of a polynucleotide encoding the substituting enzyme or other pathway polypeptides of the invention may be inserted into a host cell to increase production of a polypeptide. An increase in the copy number can be obtained by integrating one or more additional copies of the enzyme coding sequence into the host cell genome or by including an amplifiable selectable marker gene with the polynucleotide, so that cells containing amplified copies of the selectable marker gene—and thereby additional copies of the polynucleotide—can be selected by cultivating the cells in the presence of the appropriate selectable agent. The procedures used to ligate the elements described above to construct the recombinant expression vectors of the present invention are well known to one skilled in the art (see, e.g., Green & Sambrook, 2012, Molecular cloning: A laboratory Manual, Fourth Edition, Cold Spring Harbor Laboratory, New York, USA).

### Fermentation Methods for Producing Compounds of the Invention.

[0297] Where the method of the invention is wholly or partially performed by fermenting a cell culture of the the genetically modified host cell of the invention, the method claims suitably further comprise:
[0298] a) culturing the cell culture described herein at conditions allowing the host cell to produce the tryptamine derivative (I); and
[0299] b) optionally recovering and/or isolating the tryptamine derivative (I).

[0300] The cell culture can be cultivated in a nutrient medium and at conditions suitable for production of the tryptamine derivative of the invention and/or propagating cell count using methods known in the art. For example, the culture may be cultivated by shake flask cultivation, or small-scale or large-scale fermentation (including continuous, batch, fed-batch, feed and draw, or solid-state fermentations) in laboratory or industrial fermentors in a suitable medium and under conditions allowing the host cells to grow and/or propagate, optionally to be recovered and/or isolated.

[0301] The cultivation can take place in a suitable nutrient medium comprising carbon and nitrogen sources and inorganic salts, using procedures known in the art. Suitable media are available from commercial suppliers or may be prepared according to published recipes (e.g. from catalogues of the American Type Culture Collection). The selection of the appropriate medium may be based on the choice of host cell and/or based on the regulatory requirements for the host cell. Such media are available in the art. The medium may, if desired, contain additional components favoring the transformed expression hosts over other potentially contaminating microorganisms. Accordingly, in an embodiment a suitable nutrient medium comprises a carbon source (e.g. glucose, maltose, molasses, starch, cellulose, xylan, pectin, lignocellolytic biomass hydrolysate, etc.), a nitrogen source (e. g. ammonium sulphate, ammonium nitrate, ammonium chloride, etc.), an organic nitrogen source (e.g. yeast extract, malt extract, peptone, etc.) and inorganic nutrient sources (e.g. phosphate, magnesium, potassium, zinc, iron, etc.).

[0302] The cultivation of the host cell may be performed over a period of from about 0.5 to about 30 days. The cultivation process may be a batch process, continuous or fed-batch process, suitably performed at a temperature in the range of 0-100° C. or 0-80° C., for example, from about 0° C. to about 50° C. and/or at a pH, for example, from about 2 to about 10. Preferred fermentation conditions for yeast and filamentous fungi are a temperature in the range of from about 25° C. to about 55° C. and at a pH of from about 3 to about 9. The appropriate conditions are usually selected based on the choice of host cell. Accordingly, in an embodiment the method of the invention further comprises one or more elements selected from:
[0303] a) culturing the cell culture in a nutrient growth medium;
[0304] b) culturing the cell culture under aerobic or anaerobic conditions
[0305] c) culturing the cell culture under agitation;
[0306] d) culturing the cell culture at a temperature of between 25 to 50° C.;
[0307] e) culturing the cell culture at a pH of between 3-9;
[0308] f) culturing the cell culture for between 10 hours to 30 days; and
[0309] g) culturing the cell culture under fed-batch, repeated fed-batch, continuous, or semi-continuous conditions.

[0310] The fermentation method of the invention, further suitably comprise feeding one or more exogenous indole acceptor or precursors thereof and/or substituent donors to the cell culture.

[0311] The cell culture and/or the the metabolites comprised therein may be recovered and or isolated using methods known in the art. For example, the cells and or metabolites may be recovered from the nutrient medium by conventional procedures including, but not limited to, centrifugation, filtration, spray-drying, or lyophilization. In a particular embodiment the method includes a recovery and/or isolation step comprising separating a liquid phase of the cell or cell culture from a solid phase of the cell or cell culture to obtain a supernatant comprising the tryptamine derivative and subjecting the supernatant to one or more steps selected from:
[0312] a) disrupting the host cell to release intracellular tryptamine derivative into the supernatant;
[0313] b) separating the supernatant form the solid phase of the host cell, such as by filtration or gravity separation;
[0314] c) contacting the supernatant with one or more adsorbent resins in order to obtain at least a portion of the produced tryptamine derivative;
[0315] d) contacting the supernatant with one or more ion exchange or reversed-phase chromatography columns in order to obtain at least a portion of the tryptamine derivative;
[0316] e) extracting the tryptamine derivative; and
[0317] f) precipitating the tryptamine derivative by crystallization or evaporating the solvent of the liquid phase; and optionally isolating the tryptamine derivative by filtration or gravity separation; thereby recovering and/or isolating the tryptamine derivative.

### Fermentation Liquids/Compositions

[0318] The invention further provides a fermentation liquid/composition comprising the cell culture of the invention and the tryptamine derivative comprised therein.

[0319] In one embodiment at least 10%, 25%, 50%, such as at least 75%, such as at least 95%, such as at least 99% of the cells of the fermentation liquid/composition of the invention are lysed. Further in the fermentation liquid/composition of the invention at least 10%, 25%, 50%, such as at least 75%, such as at least 95%, such as at least 99% of solid cellular material may have been removed and separated from a liquid phase. Moreover, in addition to the tryptamine derivative the fermentation liquid/composition of the invention may also comprise precursors, products, metabolites of the indole acceptor pathway, in particular tryptophan and/or tryptamine or comprise one or more compounds selected from trace metals, vitamins, salts, yeast nitrogen base, carbon source, YNB, and/or amino acids of the fermentation. In particular the fermentation liquid/composition comprises a concentration of tryptamine derivative of at least 1 mg/kg or mg/L composition, such as at least 5 mg/kg or mg/L, such as at least 10 mg/kg or mg/L, such as at least 20 mg/kg or mg/L, such as at least 50 mg/kg or mg/L, such as at least 100 mg/kg or mg/L, such as at least 500 mg/kg or mg/L, such as at least 1000 mg/kg or mg/L, such as at least 5000 mg/kg or mg/L, such as at least 10000 mg/kg or mg/L, such as at least 50000 mg/kg or mg/L.

### Compositions

[0320] In a further aspect the invention further provides a composition comprising the fermentation liquid/composition of the invention and one or more carriers, agents, additives and/or excipients. Carriers, agents, additives and/or excipients includes formulation additives, stabilising agent, fillers, and the like. The composition may be formulated into a dry solid form, such as powders, tablets, capsules, hard chewables and or soft lozenges or a gums by using methods known in the art, such as spray drying, spray cooling, lyophilization, flash freezing, granulation, microgranulation, encapsulation or microencapsulation. The composition may also be formulated into liquid stabilized form using methods known in the art, such as formulation into a stabilized liquid comprising one or more stabilizers such as sugars and/or polyols (e.g. sugar alcohols) and/or organic acids (e.g. lactic acid).

### Further Aspects

[0321] In addition to the method and host cells described herein producing tryptamine derivatives of formula (I), a further aspect relates to methods and host cells for producing serotonin (an indole acceptor), which for example are useful in the methods described herein for making tryptamine derivatives of formula (I). The known route to serotonin is long and complicated and requires addition or engineering of an essential co-factor, the present inventor have now fould that serotonin can be much more efficiently produced in engineered host cells producing or being fed tryptamine and expressing both a tryptamine 5-hydroxylase converting tryptamine to serotonin; and a Cytochrome p450 reductase assisting the Tryptamine 5-hydroxylase conversion of tryptamine to serotonin.

[0322] Accordingly, provided for herein is genetically modified microbial host cell producing a serotonin indole acceptor expressing one or more genes encoding polypeptides selected from
[0323] a) one or more genes encoding polypeptides selected from
   [0324] i) one or more enzymes converting glucose to fructose-6-phosphate;
   [0325] ii) oa fructose-6-phosphate phosphoketolase converting fructose-6-phosphate to Erythrose-4-phosphate and acetyl phosphate;
   [0326] iii) a Phosphotransacetylase converting Acetyl phosphate to Acetyl-CoA;
   [0327] iv) one or more enzymes converting Fructose-6-phosphate to Phosphoenolpyruvate;
   [0328] v) a 3-deoxy-D-arabino-heptulosonate 7-phosphate synthase (DAHP synthase) converting Phosphoenolpyruvate and Erythrose-4-phosphate to 3-deoxy-D-arabino-heptulosonate-7-phosphate (DAHP);
   [0329] vi) one or more enzymes converting 3-deoxy-D-arabino-heptulosonate-7-phosphate to 5-enolpyruvoyl-shikimate 3-phosphate;
   [0330] vii) a Shikimate kinase converting Shikimate to Shikimate-3-phosphate;
   [0331] viii) a Chorismate synthase converting 5-enolpyruvoyl-shikimate 3-phosphate to Chorismate;
   [0332] ix) a Anthranilate synthase converting Chorismate to Anthranilate;
   [0333] x) a Ribose-phosphate pyrophosphokinase converting Ribose-5-phosphate to Phospho-alpha-D-ribosyl-1-pyrophosphate;
   [0334] xi) a Anthranilate phosphoribosyl transferase converting Anthranilate and Phospho-alpha-D-ribosyl-1-pyrophosphate to N-(5-phosphoribosyl)-anthranilate;
   [0335] xii) a N-(5′-phosphoribosyl)-anthranilate isomerase converting N-(5-phosphoribosyl)-anthranilate to 1-(o-carboxyphenylamino)-1′-deoxyribulose 5′-phosphate;
   [0336] xiii) an Indole-3-glycerol phosphate synthase converting 1-(o-carboxyphenylamino)-1′-deoxyribulose 5′-phosphate to (1S,2R)-1-C-(indol-3-yl)-glycerol 3-phosphate;
   [0337] xiv) a Tryptophan synthase converting (1S,2R)-1-C-(indol-3-yl) glycerol 3-phosphate and Serine to L-Tryptophan; and/or
   [0338] xv) a Tryptophan decarboxylase converting L-Tryptophan to Tryptamine; and
[0339] b) a heterologous Tryptamine 5-hydroxylase converting tryptamine to serotonin; and
[0340] c) a heterologous Cytochrome p450 reductase assisting the conversion of tryptamine to serotonin by a Tryptamine 5-hydroxylase.

[0341] Where the host cell is S. cerevisiae this species contains a native CPR enzyme (Ncp1), but it does not function with heterologous CYP enzymes such as tryptamine 5-hydroxylases.

[0342] Herein it has been shown that such engineered host cells can efficiently produce serotonin by an alternative biosynthetic pathway not previously described in the art. This production method offers significant improvement over the art by being more efficient but also alleviating the need to produce tetrahydrobiopterin or add it exogenously.

[0343] In important embodiments in the host cell producing serotonin the corresponding:
[0344] a) fructose-6-phosphate phosphoketolase has at least 70%, such at least 75%, such as at least 80%, such as at least 90%, such as at least 95%, such as at least 99%, such as 100% identity to the fructose-6-phosphate phosphoketolase comprised in SEQ ID NO: 2;
[0345] b) Phosphotransacetylase has at least 70%, such at least 75%, such as at least 80%, such as at least 90%, such as at least 95%, such as at least 99%, such as 100% identity to the Phosphotransacetylase comprised in SEQ ID NO: 4;
[0346] c) 3-deoxy-D-arabino-heptulosonate 7-phosphate synthase has at least 70%, such at least 75%, such as at least 80%, such as at least 90%, such as at least 95%, such as at least 99%, such as 100% identity to the 3-deoxy-D-arabino-heptulosonate 7-phosphate synthase comprised in SEQ ID NO: 6;
[0347] d) Enzyme converting 3-deoxy-D-arabino-heptulosonate-7-phosphate to 5-enolpyruvoyl-shikimate 3-phosphate has at least 70%, such at least 75%, such as at least 80%, such as at least 90%, such as at least 95%, such as at least 99%, such as 100% identity to the Enzyme comprised in SEQ ID NO: 8;
[0348] e) Shikimate kinase has at least 70%, such at least 75%, such as at least 80%, such as at least 90%, such as at least 95%, such as at least 99%, such as 100% identity to the Shikimate kinase comprised in SEQ ID NO: 10;
[0349] f) Chorismate synthase has at least 70%, such at least 75%, such as at least 80%, such as at least 90%, such as at least 95%, such as at least 99%, such as 100% identity to the Chorismate synthase comprised in SEQ ID NO: 12;
[0350] g) Anthranilate synthase has at least 70%, such at least 75%, such as at least 80%, such as at least 90%, such as at least 95%, such as at least 99%, such as 100% identity to the Anthranilate synthase comprised in SEQ ID NO: 14;
[0351] h) Ribose-phosphate pyrophosphokinase has at least 70%, such at least 75%, such as at least 80%, such as at least 90%, such as at least 95%, such as at least 99%, such as 100% identity to the Ribose-phosphate pyrophosphokinase comprised in SEQ ID NO: 16;
[0352] i) Anthranilate phosphoribosyl transferase has at least 70%, such at least 75%, such as at least 80%, such as at least 90%, such as at least 95%, such as at least 99%, such as 100% identity to the Anthranilate phosphoribosyl transferase comprised in SEQ ID NO: 18;
[0353] j) N-(5′-phosphoribosyl)-anthranilate isomerase has at least 70%, such at least 75%, such as at least 80%, such as at least 90%, such as at least 95%, such as at least 99%, such as 100% identity to the N-(5′-phosphoribosyl)-anthranilate isomerase comprised in SEQ ID NO: 20;
[0354] k) Indole-3-glycerol phosphate synthase has at least 70%, such at least 75%, such as at least 80%, such as at least 90%, such as at least 95%, such as at least 99%, such as 100% identity to the Indole-3-glycerol phosphate synthase comprised in SEQ ID NO: 22;
[0355] l) Tryptophan synthase has at least 70%, such at least 75%, such as at least 80%, such as at least 90%, such as at least 95%, such as at least 99%, such as 100% identity to the Tryptophan synthase comprised in anyone of SEQ ID NO: 24, 60, 62, 64, 66, 68, 180 and/or 182;
[0356] m) Tryptophan decarboxylase or a non-canonical aromatic amino acid decarboxylase has at least 70%, such at least 75%, such as at least 80%, such as at least 90%, such as at least 95%, such as at least 99%, such as 100% identity to the Tryptophan decarboxylase or a non-canonical aromatic amino acid decarboxylase comprised in anyone of SEQ ID NO: 26, 70, 72, 74, 76, and/or 78;
[0357] n) Tryptamine 5-hydroxylase has at least 70%, such at least 75%, such as at least 80%, such as at least 90%, such as at least 95%, such as at least 99%, such as 100% identity to the Tryptamine 5-hydroxylase comprised in SEQ ID NO: 96 (OsT5H); and
[0358] o) Cytochrome p450 reductase has at least 70%, such at least 75%, such as at least 80%, such as at least 90%, such as at least 95%, such as at least 99%, such as 100% identity to the Cytochrome p450 reductase comprised in SEQ ID NO: 112 (FoCPR).

[0359] In the host cell producing serotonin the one or more expressed genes are preferably selected from:
[0360] a) genes encoding a fructose-6-phosphate phosphoketolase said genes being at least 70%, such at least 75%, such as at least 80%, such as at least 90%, such as at least 95%, such as at least 99%, such as 100% identical to the fructose-6-phosphate phosphoketolase encoding polynucleotide comprised in SEQ ID NO: 1 or genomic DNA thereof;
[0361] b) genes encoding a Phosphotransacetylase said genes being at least 70%, such at least 75%, such as at least 80%, such as at least 90%, such as at least 95%, such as at least 99%, such as 100% identical to the Phosphotransacetylase encoding polynucleotide comprised in SEQ ID NO: 3 or genomic DNA thereof;
[0362] c) genes encoding a 3-deoxy-D-arabino-heptulosonate 7-phosphate synthase said genes being at least 70%, such at least 75%, such as at least 80%, such as at least 90%, such as at least 95%, such as at least 99%, such as 100% identical to the 3-deoxy-D-arabino-heptulosonate 7-phosphate synthase encoding polynucleotide comprised in SEQ ID NO: 5 or genomic DNA thereof;
[0363] d) genes encoding an enzyme converting 3-deoxy-D-arabino-heptulosonate-7-phosphate to 5-enolpyruvoyl-shikimate 3-phosphate said genes being at least 70%, such at least 75%, such as at least 80%, such as at least 90%, such as at least 95%, such as at least 99%, such as 100% identical to the polynucleotide encoding the enzyme converting 3-deoxy-D-arabino-heptulosonate-7-phosphate to 5-enolpyruvoyl-shikimate 3-phosphate comprised in SEQ ID NO: 7 or genomic DNA thereof;
[0364] e) genes encoding a Shikimate kinase said genes being at least 70%, such at least 75%, such as at least 80%, such as at least 90%, such as at least 95%, such as at least 99%, such as 100% identical to the Shikimate kinase encoding polynucleotide comprised in SEQ ID NO: 9 or genomic DNA thereof;
[0365] f) genes encoding a Shikimate kinase said genes being at least 70%, such at least 75%, such as at least 80%, such as at least 90%, such as at least 95%, such as at least 99%, such as 100% identical to the Chorismate synthase encoding polynucleotide comprised in SEQ ID NO: 11 or genomic DNA thereof;
[0366] g) genes encoding a Anthranilate synthase said genes being at least 70%, such at least 75%, such as at least 80%, such as at least 90%, such as at least 95%, such as at least 99%, such as 100% identical to the Anthranilate synthase encoding polynucleotide comprised in SEQ ID NO: 13 or genomic DNA thereof;
[0367] h) genes encoding a Ribose-phosphate pyrophosphokinase said genes being at least 70%, such at least 75%, such as at least 80%, such as at least 90%, such as at least 95%, such as at least 99%, such as 100% identical to the Ribose-phosphate pyrophosphokinase encoding polynucleotide comprised in SEQ ID NO: 15 or genomic DNA thereof;
[0368] i) genes encoding a nthranilate phosphoribosyl transferase said genes being at least 70%, such at least 75%, such as at least 80%, such as at least 90%, such as at least 95%, such as at least 99%, such as 100% identical to the Anthranilate phosphoribosyl transferase encoding polynucleotide comprised in SEQ ID NO: 17 or genomic DNA thereof;
[0369] j) genes encoding a N-(5′-phosphoribosyl)-anthranilate isomerase said genes being at least 70%, such at least 75%, such as at least 80%, such as at least 90%, such as at least 95%, such as at least 99%, such as 100% identical to the N-(5′-phosphoribosyl)-anthranilate isomerase encoding polynucleotide comprised in SEQ ID NO: 19 or genomic DNA thereof;
[0370] k) genes encoding a Indole-3-glycerol phosphate synthase said genes being at least 70%, such at least 75%, such as at least 80%, such as at least 90%, such as at least 95%, such as at least 99%, such as 100% identical to the Indole-3-glycerol phosphate synthase encoding polynucleotide comprised in SEQ ID NO: 21 or genomic DNA thereof;
[0371] l) genes encoding a Tryptophan synthase said genes being at least 70%, such at least 75%, such as at least 80%, such as at least 90%, such as at least 95%, such as at least 99%, such as 100% identical to the Tryptophan synthase encoding polynucleotide comprised in anyone of SEQ ID NO: 23, 59, 61, 63, 65, 67, 179, and/or 181 or genomic DNA thereof;
[0372] m) genes encoding a Tryptophan decarboxylase, or a non-canonical aromatic amino acid decarboxylase said genes being at least 70%, such at least 75%, such as at least 80%, such as at least 90%, such as at least 95%, such as at least 99%, such as 100% identical to the Tryptophan decarboxylase or a non-canonical aromatic amino acid decarboxylase encoding polynucleotide comprised in SEQ ID NO: 25, 69, 71, 73, 75, and/or 77 or genomic DNA thereof;
[0373] n) genes encoding a Tryptamine 5-hydroxylase said genes being at least 70%, such at least 75%, such as at least 80%, such as at least 90%, such as at least 95%, such as at least 99%, such as 100% identical to the Tryptamine 5-hydroxylase encoding polynucleotide comprised in SEQ ID NO: 96 or genomic DNA thereof;
[0374] o) genes encoding a Cytochrome p450 reductase said genes being at least 70%, such at least 75%, such as at least 80%, such as at least 90%, such as at least 95%, such as at least 99%, such as 100% identical to the Cytochrome p450 reductase encoding polynucleotide comprised in SEQ ID NO: 111 or genomic DNA thereof.

[0375] Where the host cell producing the serotonin a yeast strain, such as S. cerevisiae, the host cell is preferably further modified to attenuate, disrupt and/or delete one or more native genes selected from:
[0376] a) The pyruvate kinase gene comprised in anyone of SEQ ID NO: 27 or any of its paralogs or orthologs having at least 70%, such at least 75%, such as at least 80%, such as at least 90%, such as at least 95%, such as at least 99%, such as 100% identity to SEQ ID NO: 27;
[0377] b) The phosphofructokinase gene comprised in anyone of SEQ ID NO: 29 and/or 31 or any of its paralogs or orthologs having at least 70%, such at least 75%, such as at least 80%, such as at least 90%, such as at least 95%, such as at least 99%, such as 100% identity to anyone of SEQ ID NO: 29 and/or 31;
[0378] c) The transporters gene comprised in SEQ ID NO: 33 or any of its paralogs or orthologs having at least 70%, such at least 75%, such as at least 80%, such as at least 90%, such as at least 95%, such as at least 99%, such as 100% identity to SEQ ID NO: 33;
[0379] d) The DL-glycerol-3-phosphate phosphatase gene comprised in SEQ ID NO: 34 or any of its paralogs or orthologs having at least 70%, such at least 75%, such as at least 80%, such as at least 90%, such as at least 95%, such as at least 99%, such as 100% identity to SEQ ID NO: 34; and/or
[0380] e) The tryptophan 2,3-dioxygenase gene comprised in SEQ ID NO: 35 or any of its paralogs or orthologs having at least 70%, such at least 75%, such as at least 80%, such as at least 90%, such as at least 95%, such as at least 99%, such as 100% identity to SEQ ID NO: 35;
[0381] f) The cystathionine beta-synthase gene comprised in SEQ ID NO: 36 or any of its paralogs or orthologs having at least 70%, such at least 75%, such as at least 80%, such as at least 90%, such as at least 95%, such as at least 99%, such as 100% identity to SEQ ID NO: 36;
[0382] g) The phenylpyruvate decarboxylase gene comprised in SEQ ID NO: 37 or any of its paralogs or orthologs having at least 70%, such at least 75%, such as at least 80%, such as at least 90%, such as at least 95%, such as at least 99%, such as 100% identity to SEQ ID NO: 37;
[0383] h) The pyruvate decarboxylase gene comprised in SEQ ID NO: 38 or any of its paralogs or orthologs having at least 70%, such at least 75%, such as at least 80%, such as at least 90%, such as at least 95%, such as at least 99%, such as 100% identity to SEQ ID NO: 38; and/or
[0384] i) The histone variant H2AZ gene comprised in SEQ ID NO: 39 or any of its paralogs or orthologs having at least 70%, such at least 75%, such as at least 80%, such as at least 90%, such as at least 95%, such as at least 99%, such as 100% identity to SEQ ID NO: 39.

[0385] In such yeast host cells it is also preferred to further modify it to overexpress one or more native genes selected from the NADH kinase gene comprised in SEQ ID NO: 185 or any of its paralogs or orthologs having at least 70%, such at least 75%, such as at least 80%, such as at least 90%, such as at least 95%, such as at least 99%, such as 100% identity to SEQ ID NO: 185.

[0386] In a still further aspect provided herein is a cell culture, comprising host cell producing serotonin (an indole acceptor) and a growth medium.

[0387] In a still further aspect provided herein is a method of producing serotonin (an indole acceptor) comprising:
[0388] a) culturing the said cell culture at conditions allowing the host cell to produce the serotonin; and
[0389] b) optionally recovering and/or isolating the serotonin.

[0390] Such method can in further embodiments include one or more elements selected from:
[0391] a) culturing the cell culture in a nutrient growth medium;
[0392] b) culturing the cell culture under aerobic or anaerobic conditions
[0393] c) culturing the cell culture under agitation;
[0394] d) culturing the cell culture at a temperature of between 25 to 50° C.;
[0395] e) culturing the cell culture at a pH of between 3-9;
[0396] f) culturing the cell culture for between 10 hours to 30 days; and
[0397] g) culturing the cell culture under fed-batch, repeated fed-batch, continuous, or semi-continuous conditions.

[0398] The method can also comprise feeding one or more exogenous precursors of the serotonin pathway to the cell culture.

[0399] The recovering and/or isolation step can include separating a liquid phase of host cell or cell culture from a solid phase of host cell or cell culture to obtain a supernatant comprising the serotonin by one or more steps selected from:
[0400] a) disrupting the host cell to release intracellular serotonin indole acceptor into the supernatant;
[0401] b) separating the supernatant from the solid phase of the host cell, such as by filtration or gravity separation;
[0402] c) contacting the supernatant with one or more adsorbent resins in order to obtain at least a portion of the produced serotonin;
[0403] d) contacting the supernatant with one or more ion exchange or reversed-phase chromatography columns in order to obtain at least a portion of the serotonin;
[0404] e) extracting the serotonin; and
[0405] f) precipitating the serotonin indole acceptor by crystallization or evaporating the solvent of the liquid phase; and optionally isolating the serotonin by filtration or gravity separation; thereby recovering and/or isolating the serotonin.

[0406] In a still further aspect provided herein is a fermentation liquid/composition comprising the serotonin comprised in the cell culture or the growth medium. In such fermentation liquids at least 50%, such as at least 75%, such as at least 95%, such as at least 99% of the host cells may be disrupted and further at least 50%, such as at least 75%, such as at least 95%, such as at least 99% of solid cellular material has separated from the liquid. Moreover, in addition to the serotonin the fermentation liquid/composition of the invention may also comprise precursors, products, metabolites of the serotonin pathway, in particular tryptophan and/or tryptamine or comprise one or more compounds selected from trace metals, vitamins, salts, yeast nitrogen base, carbon source, YNB, and/or amino acids of the fermentation. In particular the fermentation liquid/composition comprises a concentration of serotonin of at least 1 mg/kg or mg/L composition, such as at least 5 mg/kg or mg/L, such as at least 10 mg/kg or mg/L, such as at least 20 mg/kg or mg/L, such as at least 50 mg/kg or mg/L, such as at least 100 mg/kg or mg/L, such as at least 500 mg/kg or mg/L, such as at least 1000 mg/kg or mg/L, such as at least 5000 mg/kg or mg/L, such as at least 10000 mg/kg or mg/L, such as at least 50000 mg/kg or mg/L.

[0407] In a further aspect provided herein is a composition comprising the fermentation liquid/composition of the invention and one or more carriers, agents, additives and/or excipients. Carriers, agents, additives and/or excipients includes formulation additives, stabilising agent, fillers, and the like. The composition may be formulated into a dry solid form, such as powders, tablets, capsules, hard chewables and or soft lozenges or a gums by using methods known in the art, such as spray drying, spray cooling, lyophilization, flash freezing, granulation, microgranulation, encapsulation or microencapsulation. The composition may also be formulated into liquid stabilized form using methods known in the art, such as formulation into a stabilized liquid comprising one or more stabilizers such as sugars and/or polyols (e.g. sugar alcohols) and/or organic acids (e.g. lactic acid).

[0408] In addition to the method and host cells described herein producing tryptamine derivatives of formula (I), a further aspect relates to methods and host cells for producing psilocybin (an indole acceptor), which for example are useful in the methods described herein for making tryptamine derivatives of formula (I).

[0409] Accordingly, provided for herein is genetically modified microbial host cell producing a psilocybin expressing one or more genes encoding polypeptides selected from
[0410] a) one or more genes encoding polypeptides selected from
   [0411] i) one or more enzymes converting glucose to fructose-6-phosphate;
   [0412] ii) oa fructose-6-phosphate phosphoketolase converting fructose-6-phosphate to Erythrose-4-phosphate and acetyl phosphate;
   [0413] iii) a Phosphotransacetylase converting Acetyl phosphate to Acetyl-CoA;
   [0414] iv) one or more enzymes converting Fructose-6-phosphate to Phosphoenolpyruvate;
   [0415] v) a 3-deoxy-D-arabino-heptulosonate 7-phosphate synthase (DAHP synthase) converting Phosphoenolpyruvate and Erythrose-4-phosphate to 3-deoxy-D-arabino-heptulosonate-7-phosphate (DAHP);
   [0416] vi) one or more enzymes converting 3-deoxy-D-arabino-heptulosonate-7-phosphate to 5-enolpyruvoyl-shikimate 3-phosphate;
   [0417] vii) a Shikimate kinase converting Shikimate to Shikimate-3-phosphate;
   [0418] viii) a Chorismate synthase converting 5-enolpyruvoyl-shikimate 3-phosphate to Chorismate;
   [0419] ix) a Anthranilate synthase converting Chorismate to Anthranilate;
   [0420] x) a Ribose-phosphate pyrophosphokinase converting Ribose-5-phosphate to Phospho-alpha-D-ribosyl-1-pyrophosphate;
   [0421] xi) a Anthranilate phosphoribosyl transferase converting Anthranilate and Phospho-alpha-D-ribosyl-1-pyrophosphate to N-(5-phosphoribosyl)-anthranilate;
   [0422] xii) a N-(5′-phosphoribosyl)-anthranilate isomerase converting N-(5-phosphoribosyl)-anthranilate to 1-(o-carboxyphenylamino)-1′-deoxyribulose 5′-phosphate;
   [0423] xiii) an Indole-3-glycerol phosphate synthase converting 1-(o-carboxyphenylamino)-1′-deoxyribulose 5′-phosphate to (1S,2R)-1-C-(indol-3-yl)-glycerol 3-phosphate;
   [0424] xiv) a Tryptophan synthase converting (1S,2R)-1-C-(indol-3-yl) glycerol 3-phosphate and Serine to L-Tryptophan; and/or
   [0425] xv) a Tryptophan decarboxylase converting L-Tryptophan to Tryptamine; and
[0426] b) a Tryptamine 4-hydroxylase converting tryptamine to 4-hydroxytryptamine;
[0427] c) a Cytochrome p450 reductase assisting tryptamine 4-hydroxylase in converting tryptamine to 4-hydroxytryptamine;
[0428] d) a Cytochrome b5 assisting tryptamine 4-hydroxylase in converting tryptamine to 4-hydroxytryptamine;
[0429] e) 4-hydroxytryptamine kinase converting 4-hydroxytryptamine to Norbaeocystin; and
[0430] f) Psilocybin synthase converting Norbaeocystin to Psilocybin.

[0431] Herein it has been shown that such engineered host cells can efficiently produce psilocybin by an alternative biosynthetic pathway not previously described in the art. This production method offers significant improvement over the art by being more efficient.

[0432] In important embodiments in the host cell producing psilocybin the corresponding:
[0433] a) fructose-6-phosphate phosphoketolase has at least 70%, such at least 75%, such as at least 80%, such as at least 90%, such as at least 95%, such as at least 99%, such as 100% identity to the fructose-6-phosphate phosphoketolase comprised in SEQ ID NO: 2;
[0434] b) Phosphotransacetylase has at least 70%, such at least 75%, such as at least 80%, such as at least 90%, such as at least 95%, such as at least 99%, such as 100% identity to the Phosphotransacetylase comprised in SEQ ID NO: 4;
[0435] c) 3-deoxy-D-arabino-heptulosonate 7-phosphate synthase has at least 70%, such at least 75%, such as at least 80%, such as at least 90%, such as at least 95%, such as at least 99%, such as 100% identity to the 3-deoxy-D-arabino-heptulosonate 7-phosphate synthase comprised in SEQ ID NO: 6;
[0436] d) Enzyme converting 3-deoxy-D-arabino-heptulosonate-7-phosphate to 5-enolpyruvoyl-shikimate 3-phosphate has at least 70%, such at least 75%, such as at least 80%, such as at least 90%, such as at least 95%, such as at least 99%, such as 100% identity to the Enzyme comprised in SEQ ID NO: 8;
[0437] e) Shikimate kinase has at least 70%, such at least 75%, such as at least 80%, such as at least 90%, such as at least 95%, such as at least 99%, such as 100% identity to the Shikimate kinase comprised in SEQ ID NO: 10;
[0438] f) Chorismate synthase has at least 70%, such at least 75%, such as at least 80%, such as at least 90%, such as at least 95%, such as at least 99%, such as 100% identity to the Chorismate synthase comprised in SEQ ID NO: 12;
[0439] g) Anthranilate synthase has at least 70%, such at least 75%, such as at least 80%, such as at least 90%, such as at least 95%, such as at least 99%, such as 100% identity to the Anthranilate synthase comprised in SEQ ID NO: 14;
[0440] h) Ribose-phosphate pyrophosphokinase has at least 70%, such at least 75%, such as at least 80%, such as at least 90%, such as at least 95%, such as at least 99%, such as 100% identity to the Ribose-phosphate pyrophosphokinase comprised in SEQ ID NO: 16;
[0441] i) Anthranilate phosphoribosyl transferase has at least 70%, such at least 75%, such as at least 80%, such as at least 90%, such as at least 95%, such as at least 99%, such as 100% identity to the Anthranilate phosphoribosyl transferase comprised in SEQ ID NO: 18;
[0442] j) N-(5′-phosphoribosyl)-anthranilate isomerase has at least 70%, such at least 75%, such as at least 80%, such as at least 90%, such as at least 95%, such as at least 99%, such as 100% identity to the N-(5′-phosphoribosyl)-anthranilate isomerase comprised in SEQ ID NO: 20;
[0443] k) Indole-3-glycerol phosphate synthase has at least 70%, such at least 75%, such as at least 80%, such as at least 90%, such as at least 95%, such as at least 99%, such as 100% identity to the Indole-3-glycerol phosphate synthase comprised in SEQ ID NO: 22;
[0444] l) Tryptophan synthase has at least 70%, such at least 75%, such as at least 80%, such as at least 90%, such as at least 95%, such as at least 99%, such as 100% identity to the Tryptophan synthase comprised in anyone of SEQ ID NO: 24, 60, 62, 64, 66, 68, 180 and/or 182;
[0445] m) Tryptophan decarboxylase or a non-canonical aromatic amino acid decarboxylase has at least 70%, such at least 75%, such as at least 80%, such as at least 90%, such as at least 95%, such as at least 99%, such as 100% identity to the Tryptophan decarboxylase or a non-canonical aromatic amino acid decarboxylase comprised in anyone of SEQ ID NO: 26, 70, 72, 74, 76, and/or 78;
[0446] n) tryptamine 4-hydroxylase has at least 70%, such at least 75%, such as at least 80%, such as at least 90%, such as at least 95%, such as at least 99%, such as 100% identity to the Tryptamine 4-hydroxylase comprised in anyone of SEQ ID NO 94 and/or 88;
[0447] o) cytochrome p450 reductase has at least 70%, such at least 75%, such as at least 80%, such as at least 90%, such as at least 95%, such as at least 99%, such as 100% identity to the Cytochrome p450 reductase comprised in anyone of SEQ ID NO 106 and/or 102;
[0448] p) cytochrome b5 has at least 70%, such at least 75%, such as at least 80%, such as at least 90%, such as at least 95%, such as at least 99%, such as 100% identity to the Cytochrome b5 comprised in anyone of SEQ ID NO 254;
[0449] q) 4-hydroxytryptamine kinase has at least 70%, such at least 75%, such as at least 80%, such as at least 90%, such as at least 95%, such as at least 99%, such as 100% identity to the 4-hydroxytryptamine kinase comprised in anyone of SEQ ID NO 160 or 156; and
[0450] r) psilocybin synthase has at least 70%, such at least 75%, such as at least 80%, such as at least 90%, such as at least 95%, such as at least 99%, such as 100% identity to the psilocybin synthase comprised in anyone of SEQ ID NO 128 or 124.

[0451] In the host cell producing psilocybin the one or more expressed genes are preferably selected from:
[0452] a) genes encoding a fructose-6-phosphate phosphoketolase said genes being at least 70%, such at least 75%, such as at least 80%, such as at least 90%, such as at least 95%, such as at least 99%, such as 100% identical to the fructose-6-phosphate phosphoketolase encoding polynucleotide comprised in SEQ ID NO: 1 or genomic DNA thereof;
[0453] b) genes encoding a Phosphotransacetylase said genes being at least 70%, such at least 75%, such as at least 80%, such as at least 90%, such as at least 95%, such as at least 99%, such as 100% identical to the Phosphotransacetylase encoding polynucleotide comprised in SEQ ID NO: 3 or genomic DNA thereof;
[0454] c) genes encoding a 3-deoxy-D-arabino-heptulosonate 7-phosphate synthase said genes being at least 70%, such at least 75%, such as at least 80%, such as at least 90%, such as at least 95%, such as at least 99%, such as 100% identical to the 3-deoxy-D-arabino-heptulosonate 7-phosphate synthase encoding polynucleotide comprised in SEQ ID NO: 5 or genomic DNA thereof;
[0455] d) genes encoding an enzyme converting 3-deoxy-D-arabino-heptulosonate-7-phosphate to 5-enolpyruvoyl-shikimate 3-phosphate said genes being at least 70%, such at least 75%, such as at least 80%, such as at least 90%, such as at least 95%, such as at least 99%, such as 100% identical to the polynucleotide encoding the enzyme converting 3-deoxy-D-arabino-heptulosonate-7-phosphate to 5-enolpyruvoyl-shikimate 3-phosphate comprised in SEQ ID NO: 7 or genomic DNA thereof;
[0456] e) genes encoding a Shikimate kinase said genes being at least 70%, such at least 75%, such as at least 80%, such as at least 90%, such as at least 95%, such as at least 99%, such as 100% identical to the Shikimate kinase encoding polynucleotide comprised in SEQ ID NO: 9 or genomic DNA thereof;
[0457] f) genes encoding a Shikimate kinase said genes being at least 70%, such at least 75%, such as at least 80%, such as at least 90%, such as at least 95%, such as at least 99%, such as 100% identical to the Chorismate synthase encoding polynucleotide comprised in SEQ ID NO: 11 or genomic DNA thereof;
[0458] g) genes encoding a Anthranilate synthase said genes being at least 70%, such at least 75%, such as at least 80%, such as at least 90%, such as at least 95%, such as at least 99%, such as 100% identical to the Anthranilate synthase encoding polynucleotide comprised in SEQ ID NO: 13 or genomic DNA thereof;
[0459] h) genes encoding a Ribose-phosphate pyrophosphokinase said genes being at least 70%, such at least 75%, such as at least 80%, such as at least 90%, such as at least 95%, such as at least 99%, such as 100% identical to the Ribose-phosphate pyrophosphokinase encoding polynucleotide comprised in SEQ ID NO: 15 or genomic DNA thereof;
[0460] i) genes encoding a nthranilate phosphoribosyl transferase said genes being at least 70%, such at least 75%, such as at least 80%, such as at least 90%, such as at least 95%, such as at least 99%, such as 100% identical to the Anthranilate phosphoribosyl transferase encoding polynucleotide comprised in SEQ ID NO: 17 or genomic DNA thereof;
[0461] j) genes encoding a N-(5′-phosphoribosyl)-anthranilate isomerase said genes being at least 70%, such at least 75%, such as at least 80%, such as at least 90%, such as at least 95%, such as at least 99%, such as 100% identical to the N-(5′-phosphoribosyl)-anthranilate isomerase encoding polynucleotide comprised in SEQ ID NO: 19 or genomic DNA thereof;
[0462] k) genes encoding a Indole-3-glycerol phosphate synthase said genes being at least 70%, such at least 75%, such as at least 80%, such as at least 90%, such as at least 95%, such as at least 99%, such as 100% identical to the Indole-3-glycerol phosphate synthase encoding polynucleotide comprised in SEQ ID NO: 21 or genomic DNA thereof;
[0463] l) genes encoding a Tryptophan synthase said genes being at least 70%, such at least 75%, such as at least 80%, such as at least 90%, such as at least 95%, such as at least 99%, such as 100% identical to the Tryptophan synthase encoding polynucleotide comprised in anyone of SEQ ID NO: 23, 59, 61, 63, 65, 67, 179, and/or 181 or genomic DNA thereof;
[0464] m) genes encoding a Tryptophan decarboxylase or a non-canonical aromatic amino acid decarboxylase said genes being at least 70%, such at least 75%, such as at least 80%, such as at least 90%, such as at least 95%, such as at least 99%, such as 100% identical to the Tryptophan decarboxylase or a non-canonical aromatic amino acid decarboxylase encoding polynucleotide comprised in SEQ ID NO: 25, 69, 71, 73, 75, and/or 77 or genomic DNA thereof;
[0465] n) genes encoding a tryptamine 4-hydroxylase said genes at least 70%, such at least 75%, such as at least 80%, such as at least 90%, such as at least 95%, such as at least 99%, such as 100% identical to the tryptamine 4-hydroxylase encoding polynucleotide comprised in SEQ ID NO 93 and/or 87;
[0466] o) genes encoding a cytochrome p450 reductase said genes being at least 70%, such at least 75%, such as at least 80%, such as at least 90%, such as at least 95%, such as at least 99%, such as 100% identical to the cytochrome p450 reductase comprised in anyone of SEQ ID NO 105 and/or 101;
[0467] p) genes encoding a cytochrome b5 said genes being at least 70%, such at least 75%, such as at least 80%, such as at least 90%, such as at least 95%, such as at least 99%, such as 100% identical to the Cytochrome b5 encoding polynucleotide comprised in SEQ ID NO 253;
[0468] q) genes encoding a 4-hydroxytryptamine kinase said genes being at least 70%, such at least 75%, such as at least 80%, such as at least 90%, such as at least 95%, such as at least 99%, such as 100% identical to the 4-hydroxytryptamine kinase encoding polynucleotide comprised SEQ ID NO 159 and/or 155; and/or
[0469] r) genes encoding a psilocybin synthase said genes being at least 70%, such at least 75%, such as at least 80%, such as at least 90%, such as at least 95%, such as at least 99%, such as 100% identical to the psilocybin synthase encoding polynucleotide comprised in SEQ ID NO 127 and/or 123.

[0470] Where the host cell producing the psilocybin a yeast strain, such as S. cerevisiae, the host cell is preferably further modified to attenuate, disrupt and/or delete one or more native genes selected from:
[0471] a) The pyruvate kinase gene comprised in anyone of SEQ ID NO: 27 or any of its paralogs or orthologs having at least 70%, such at least 75%, such as at least 80%, such as at least 90%, such as at least 95%, such as at least 99%, such as 100% identity to SEQ ID NO: 27;
[0472] b) The phosphofructokinase gene comprised in anyone of SEQ ID NO: 29 and/or 31 or any of its paralogs or orthologs having at least 70%, such at least 75%, such as at least 80%, such as at least 90%, such as at least 95%, such as at least 99%, such as 100% identity to anyone of SEQ ID NO: 29 and/or 31;
[0473] c) The transporters gene comprised in SEQ ID NO: 33 or any of its paralogs or orthologs having at least 70%, such at least 75%, such as at least 80%, such as at least 90%, such as at least 95%, such as at least 99%, such as 100% identity to SEQ ID NO: 33;
[0474] d) The DL-glycerol-3-phosphate phosphatase gene comprised in SEQ ID NO: 34 or any of its paralogs or orthologs having at least 70%, such at least 75%, such as at least 80%, such as at least 90%, such as at least 95%, such as at least 99%, such as 100% identity to SEQ ID NO: 34; and/or
[0475] e) The tryptophan 2,3-dioxygenase gene comprised in SEQ ID NO: 35 or any of its paralogs or orthologs having at least 70%, such at least 75%, such as at least 80%, such as at least 90%, such as at least 95%, such as at least 99%, such as 100% identity to SEQ ID NO: 35;
[0476] f) The cystathionine beta-synthase gene comprised in SEQ ID NO: 36 or any of its paralogs or orthologs having at least 70%, such at least 75%, such as at least 80%, such as at least 90%, such as at least 95%, such as at least 99%, such as 100% identity to SEQ ID NO: 36;
[0477] g) The phenylpyruvate decarboxylase gene comprised in SEQ ID NO: 37 or any of its paralogs or orthologs having at least 70%, such at least 75%, such as at least 80%, such as at least 90%, such as at least 95%, such as at least 99%, such as 100% identity to SEQ ID NO: 37;
[0478] h) The pyruvate decarboxylase gene comprised in SEQ ID NO: 38 or any of its paralogs or orthologs having at least 70%, such at least 75%, such as at least 80%, such as at least 90%, such as at least 95%, such as at least 99%, such as 100% identity to SEQ ID NO: 38;
[0479] i) The histone variant H2AZ gene comprised in SEQ ID NO: 39 or any of its paralogs or orthologs having at least 70%, such at least 75%, such as at least 80%, such as at least 90%, such as at least 95%, such as at least 99%, such as 100% identity to SEQ ID NO: 39;
[0480] j) the phosphatase gene comprised in SEQ ID NO: 40 or any of its paralogs or orthologs having at least 70%, such at least 75%, such as at least 80%, such as at least 90%, such as at least 95%, such as at least 99%, such as 100% identity to SEQ ID NO: 40;
[0481] k) the repressible acid phosphatase gene comprised in anyone of SEQ ID NO: 41, 42, or 43 and/or any of its paralogs or orthologs having at least 70%, such at least 75%, such as at least 80%, such as at least 90%, such as at least 95%, such as at least 99%, such as 100% identity to anyone of SEQ ID NO: 41, 42, and/or 43; and/or
[0482] l) the constitutively expressed acid phosphatase gene comprised in SEQ ID NO: 44 and/or any of its paralogs or orthologs having at least 70%, such at least 75%, such as at least 80%, such as at least 90%, such as at least 95%, such as at least 99%, such as 100% identity to SEQ ID NO: 44.

[0483] Attenuating, disrupting and/or deleting one or more of the native phosphatase, repressible acid phosphatase and/or constitutively expressed acid phosphatase genes is particularly useful, because it has bee found that expression of these phosphatases shunts tryptamine away from psilocybin to psilocin.

[0484] In such yeast host cells it is also preferred to further modify it to overexpress one or more native genes selected from the NADH kinase gene comprised in SEQ ID NO: 185 or any of its paralogs or orthologs having at least 70%, such at least 75%, such as at least 80%, such as at least 90%, such as at least 95%, such as at least 99%, such as 100% identity to SEQ ID NO: 185.

[0485] In a still further aspect provided herein is a cell culture, comprising host cell producing psilocybin (an indole acceptor) and a growth medium.

[0486] In a still further aspect provided herein is a method of producing psilocybin (an indole acceptor) comprising:
[0487] c) culturing the said cell culture at conditions allowing the host cell to produce the psilocybin; and
[0488] d) optionally recovering and/or isolating the psilocybin.

[0489] Such method can in further embodiments include one or more elements selected from:
[0490] h) culturing the cell culture in a nutrient growth medium;
[0491] i) culturing the cell culture under aerobic or anaerobic conditions
[0492] j) culturing the cell culture under agitation;
[0493] k) culturing the cell culture at a temperature of between 25 to 50° C.;
[0494] I) culturing the cell culture at a pH of between 3-9;
[0495] m) culturing the cell culture for between 10 hours to 30 days; and
[0496] n) culturing the cell culture under fed-batch, repeated fed-batch, continuous, or semi-continuous conditions.

[0497] The method can also comprise feeding one or more exogenous precursors of the psilocybin pathway to the cell culture.

[0498] The recovering and/or isolation step can include separating a liquid phase of host cell or cell culture from a solid phase of host cell or cell culture to obtain a supernatant comprising the psilocybin by one or more steps selected from:
[0499] g) disrupting the host cell to release intracellular psilocybin indole acceptor into the supernatant;
[0500] h) separating the supernatant from the solid phase of the host cell, such as by filtration or gravity separation;
[0501] i) contacting the supernatant with one or more adsorbent resins in order to obtain at least a portion of the produced psilocybin;
[0502] j) contacting the supernatant with one or more ion exchange or reversed-phase chromatography columns in order to obtain at least a portion of the psilocybin;
[0503] k) extracting the psilocybin; and
[0504] l) precipitating the psilocybin indole acceptor by crystallization or evaporating the solvent of the liquid phase; and optionally isolating the psilocybin by filtration or gravity separation; thereby recovering and/or isolating the psilocybin.

[0505] In a still further aspect provided herein is a fermentation liquid/composition comprising the psilocybin comprised in the cell culture or the growth medium. In such fermentation liquids at least 50%, such as at least 75%, such as at least 95%, such as at least 99% of the host cells may be disrupted and further at least 50%, such as at least 75%, such as at least 95%, such as at least 99% of solid cellular material has separated from the liquid. Moreover, in addition to the psilocybin the fermentation liquid/composition of the invention may also comprise precursors, products, metabolites of the psilocybin pathway, in particular tryptophan and/or tryptamine or comprise one or more compounds selected from trace metals, vitamins, salts, yeast nitrogen base, carbon source, YNB, and/or amino acids of the fermentation. In particular the fermentation liquid/composition comprises a concentration of psilocybin of at least 1 mg/kg or mg/L composition, such as at least 5 mg/kg or mg/L, such as at least 10 mg/kg or mg/L, such as at least 20 mg/kg or mg/L, such as at least 50 mg/kg or mg/L, such as at least 100 mg/kg or mg/L, such as at least 500 mg/kg or mg/L, such as at least 1000 mg/kg or mg/L, such as at least 5000 mg/kg or mg/L, such as at least 10000 mg/kg or mg/L, such as at least 50000 mg/kg or mg/L.

[0506] In a further aspect provided herein is a composition comprising the fermentation liquid/composition of the invention and one or more carriers, agents, additives and/or excipients. Carriers, agents, additives and/or excipients includes formulation additives, stabilising agent, fillers, and the like. The composition may be formulated into a dry solid form, such as powders, tablets, capsules, hard chewables and or soft lozenges or a gums by using methods known in the art, such as spray drying, spray cooling, lyophilization, flash freezing, granulation, microgranulation, encapsulation or microencapsulation. The composition may also be formulated into liquid stabilized form using methods known in the art, such as formulation into a stabilized liquid comprising one or more stabilizers such as sugars and/or polyols (e.g. sugar alcohols) and/or organic acids (e.g. lactic acid).

### Sequences

[0507] The present application contains a Sequence Listing prepared in PatentIn version 3.5.1, which is also submitted electronically in ST25 format which is hereby incorporated by reference in its entirety. For further reference, the following sequences are included with this application:

| | | | | | | |
|---|---|---|---|---|---|---|
| SEQ ID | DNA | sequence | Fructose-6-phosphate | BfXfpk | From | Bifidobacterium |
| NO: 1 | | of | Phosphoketolase | | | breve |
| SEQ ID | Protein | sequence | Fructose-6-phosphate | BfXfpk | From | Bifidobacterium |
| NO: 2 | | of | Phosphoketolase | | | breve |
| SEQ ID | DNA | sequence | Phosphotransacetylase | CkPta | From | Clostridium kluyveri |
| NO: 3 | | of | | | | |
| SEQ ID | Protein | sequence | Phosphotransacetylase | CkPta | From | Clostridium kluyveri |
| NO: 4 | | of | | | | |
| SEQ ID | DNA | sequence | DAHP synthase | ARO4(K229L) | From | Saccharomyces |
| NO: 5 | | of | | | | cerevisiae |
| SEQ ID | Protein | sequence | DAHP synthase | ARO4(K229L) | From | Saccharomyces |
| NO: 6 | | of | | | | cerevisiae |
| SEQ ID | DNA | sequence | Multiple native enzymatic | ARO1 | From | Saccharomyces |
| NO: 7 | | of | steps | | | cerevisiae |
| SEQ ID | Protein | sequence | Multiple native enzymatic | ARO1 | From | Saccharomyces |
| NO: 8 | | of | steps | | | cerevisiae |
| SEQ ID | DNA | sequence | Shikimate kinase | EcAroL | From | Escherichia coli |
| NO: 9 | | of | | | | |
| SEQ ID | Protein | sequence | Shikimate kinase | EcAroL | From | Escherichia coli |
| NO: 10 | | of | | | | |
| SEQ ID | DNA | sequence | Chorismate synthase | ARO2 | From | Saccharomyces |
| NO: 11 | | of | | | | cerevisiae |
| SEQ ID | Protein | sequence | Chorismate synthase | ARO2 | From | Saccharomyces |
| NO: 12 | | of | | | | cerevisiae |
| SEQ ID | DNA | sequence | Anthranilate synthase | TRP2(S65R, S76L) | From | Saccharomyces |
| NO: 13 | | of | | | | cerevisiae |
| SEQ ID | Protein | sequence | Anthranilate synthase | TRP2(S65R, S76L) | From | Saccharomyces |
| NO: 14 | | of | | | | cerevisiae |
| SEQ ID | DNA | sequence | Ribose-phosphate | BsPrs | From | Bacillus subtilis |
| NO: 15 | | of | pyrophosphokinase | | | |
| SEQ ID | Protein | sequence | Ribose-phosphate | BsPrs | From | Bacillus subtilis |
| NO: 16 | | of | pyrophosphokinase | | | |
| SEQ ID | DNA | sequence | Anthranilate | TRP4 | From | Saccharomyces |
| NO: 17 | | of | phosphoribosyl | | | cerevisiae |
| | | | transferase | | | |
| SEQ ID | Protein | sequence | Anthranilate | TRP4 | From | Saccharomyces |
| NO: 18 | | of | phosphoribosyl | | | cerevisiae |
| | | | transferase | | | |
| SEQ ID | DNA | sequence | N-(5′-phosphoribosyl)- | TRP1 | From | Saccharomyces |
| NO: 19 | | of | anthranilate isomerase | | | cerevisiae |
| SEQ ID | Protein | sequence | N-(5′-phosphoribosyl)- | TRP1 | From | Saccharomyces |
| NO: 20 | | of | anthranilate isomerase | | | cerevisiae |
| SEQ ID | DNA | sequence | Indole-3-glycerol | TRP3 | From | Saccharomyces |
| NO: 21 | | of | phosphate synthase | | | cerevisiae |
| SEQ ID | Proteir | sequence | Indole-3-glycerol | TRP3 | From | Saccharomyces |
| NO: 22 | | of | phosphate synthase | | | cerevisiae |
| SEQ ID | DNA | sequence | Tryptophan synthase | TRP5 | From | Saccharomyces |
| NO: 23 | | of | | | | cerevisiae |
| SEQ ID | Protein | sequence | Tryptophan synthase | TRP5 | From | Saccharomyces |
| NO: 24 | | of | | | | cerevisiae |
| SEQ ID | DNA | sequence | Tryptophan | CrTdc | From | Catharanthus roseus |
| NO: 25 | | of | decarboxylase | | | |
| SEQ ID | Protein | sequence | Tryptophan | CrTdc | From | Catharanthus roseus |
| NO: 26 | | of | decarboxylase | | | |
| SEQ ID | DNA | sequence | Pyruvate kinase | CDC19 | From | Saccharomyces |
| NO: 27 | | of | | | | cerevisiae |
| SEQ ID | Protein | sequence | Pyruvate kinase | CDC19 | From | Saccharomyces |
| NO: 28 | | of | | | | cerevisiae |
| SEQ ID | DNA | sequence | Phosphofructokinase | PFK1 | From | Saccharomyces |
| NO: 29 | | of | | | | cerevisiae |
| SEQ ID | Protein | sequence | Phosphofructokinase | PFK1 | From | Saccharomyces |
| NO: 30 | | of | | | | cerevisiae |
| SEQ ID | DNA | sequence | Phosphofructokinase | PFK2 | From | Saccharomyces |
| NO: 31 | | of | | | | cerevisiae |
| SEQ ID | Protein | sequence | Phosphofructokinase | PFK2 | From | Saccharomyces |
| NO: 32 | | of | | | | cerevisiae |
| SEQ ID | DNA | sequence | cis-Golgi network | RIC1 | From | Saccharomyces |
| NO: 33 | | of | transporter protein | | | cerevisiae |
| SEQ ID | DNA | sequence | DL-glycerol-3-phosphate | GPP1 | From | Saccharomyces |
| NO: 34 | | of | phosphatase | | | cerevisiae |
| SEQ ID | DNA | sequence | Tryptophan 2,3- | BNA2 | From | Saccharomyces |
| NO: 35 | | of | dioxygenase | | | cerevisiae |
| SEQ ID | DNA | sequence | Cystathionine beta- | CYS4 | From | Saccharomyces |
| NO: 36 | | of | synthase | | | cerevisiae |
| SEQ ID | DNA | sequence | Phenylpyruvate | ARO10 | From | Saccharomyces |
| NO: 37 | | of | decarboxylase | | | cerevisiae |
| SEQ ID | DNA | sequence | Pyruvate decarboxylase | PDC5 | From | Saccharomyces |
| NO: 38 | | of | | | | cerevisiae |
| SEQ ID | DNA | sequence | Histone variant H2AZ | HTZ1 | From | Saccharomyces |
| NO: 39 | | of | | | | cerevisiae |
| SEQ ID | DNA | sequence | Unknown phosphatase | DIA3 | From | Saccharomyces |
| NO: 40 | | of | | | | cerevisiae |
| SEQ ID | DNA | sequence | Repressible acid | PHO5 | From | Saccharomyces |
| NO: 41 | | of | phosphatase | | | cerevisiae |
| SEQ ID | DNA | sequence | Repressible acid | PHO12 | From | Saccharomyces |
| NO: 42 | | of | phosphatase | | | cerevisiae |
| SEQ ID | DNA | sequence | Repressible acid | PHO11 | From | Saccharomyces |
| NO: 43 | | of | phosphatase | | | cerevisiae |
| SEQ ID | DNA | sequence | Constitutive acid | PHO3 | From | Saccharomyces |
| NO: 44 | | of | phosphatase | | | cerevisiae |
| SEQ ID | DNA | sequence | Chorismate mutase | ARO7(G141S) | From | Saccharomyces |
| NO: 45 | | of | | | | cerevisiae |
| SEQ ID | Protein | sequence | Chorismate mutase | ARO7(G141S) | From | Saccharomyces |
| NO: 46 | | of | | | | cerevisiae |
| SEQ ID | DNA | sequence | Prephenate | PHA2 | From | Saccharomyces |
| NO: 47 | | of | dehydrogenase | | | cerevisiae |
| SEQ ID | Protein | sequence | Prephenate | PHA2 | From | Saccharomyces |
| NO: 48 | | of | dehydrogenase | | | cerevisiae |
| SEQ ID | DNA | sequence | Aromatic | ARO8 | From | Saccharomyces |
| NO: 49 | | of | aminotransferase | | | cerevisiae |
| SEQ ID | Protein | sequence | Aromatic | ARO8 | From | Saccharomyces |
| NO: 50 | | of | aminotransferase | | | cerevisiae |
| SEQ ID | DNA | sequence | Phenylalanine | AtPAL2 | From | Arabidopsis thaliana |
| NO: 51 | | of | ammonium lyase | | | |
| SEQ ID | Protein | sequence | Phenylalanine | AtPAL2 | From | Arabidopsis thaliana |
| NO: 52 | | of | ammonium lyase | | | |
| SEQ ID | DNA | sequence | Cinnimate 4-hydroxylase | AtC4H | From | Arabidopsis thaliana |
| NO: 53 | | of | | | | |
| SEQ ID | Protein | sequence | Cinnimate 4-hydroxylase | AtC4H | From | Arabidopsis thaliana |
| NO: 54 | | of | | | | |
| SEQ ID | DNA | sequence | Cytochrome P450 | AtATR2 | From | Arabidopsis thaliana |
| NO: 55 | | of | reductase | | | |
| SEQ ID | Protein | sequence | Cytochrome P450 | AtATR2 | From | Arabidopsis thaliana |
| NO: 56 | | of | reductase | | | |
| SEQ ID | DNA | sequence | 4-Coumoryl-CoA ligase | At4CL2 | From | Arabidopsis thaliana |
| NO: 57 | | of | | | | |
| SEQ ID | Protein | sequence | 4-Coumoryl-CoA ligase | At4CL2 | From | Arabidopsis thaliana |
| NO: 58 | | of | | | | |
| SEQ ID | DNA | sequence | Tryptophan synthase | PfTrpB(2B9) | From | Pyrococcus furiosus |
| NO: 59 | | of | beta subunit | | | |
| SEQ ID | Protein | sequence | Tryptophan synthase | PfTrpB(2B9) | From | Pyrococcus furiosus |
| NO: 60 | | of | beta subunit | | | |
| SEQ ID | DNA | sequence | Tryptophan synthase | SeTrpB | From | Salmonella enterica |
| NO: 61 | | of | beta subunit | | | |
| SEQ ID | Protein | sequence | Tryptophan synthase | SeTrpB | From | Salmonella enterica |
| NO: 62 | | of | beta subunit | | | |
| SEQ ID | DNA | sequence | Tryptophan synthase | PfTrpB | From | Pyrococcus furiosus |
| NO: 63 | | of | beta subunit | | | |
| SEQ ID | Protein | sequence | Tryptophan synthase | PfTrpB | From | Pyrococcus furiosus |
| NO: 64 | | of | beta subunit | | | |
| SEQ ID | DNA | sequence | Tryptophan synthase | TRP5 | From | Saccharomyces |
| NO: 65 | | of | | | | cerevisiae |
| SEQ ID | Protein | sequence | Tryptophan synthase | TRP5 | From | Saccharomyces |
| NO: 66 | | of | | | | cerevisiae |
| SEQ ID | DNA | sequence | Tryptophan synthase | TmTrpB (M145T, | From | Thermotoga maritima |
| NO: 67 | | of | beta subunit | N167D) | | |
| SEQ ID | Protein | sequence | Tryptophan synthase | TmTrpB (M145T, | From | Thermotoga maritima |
| NO: 68 | | of | beta subunit | N167D) | | |
| SEQ ID | DNA | sequence | Tryptophan | RgTdc | From | Ruminococcus gnavus |
| NO: 69 | | of | decarboxylase | | | |
| SEQ ID | Protein | sequence | Tryptophan | RgTdc | From | Ruminococcus gnavus |
| NO: 70 | | of | decarboxylase | | | |
| SEQ ID | DNA | sequence | Tryptophan | PcPsiD | From | Psilocybe cubensis |
| NO: 71 | | of | decarboxylase | | | |
| SEQ ID | Protein | sequence | Tryptophan | PcPsiD | From | Psilocybe cubensis |
| NO: 72 | | of | decarboxylase | | | |
| SEQ ID | DNA | sequence | aromatic amino acid | PcncAAAD | From | Psilocybe cubensis |
| NO: 73 | | of | decarboxylase | | | |
| SEQ ID | Protein | sequence | aromatic amino acid | PcncAAAD | From | Psilocybe cubensis |
| NO: 74 | | of | decarboxylase | | | |
| SEQ ID | DNA | sequence | Tryptophan | PsPsiD | From | Psilocybe serbica |
| NO: 75 | | of | decarboxylase | | | |
| SEQ ID | Protein | sequence | Tryptophan | PsPsiD | From | Psilocybe serbica |
| NO: 76 | | of | decarboxylase | | | |
| SEQ ID | DNA | sequence | Tryptophan | PanCyPsiD | From | Panaeolus |
| NO: 77 | | of | decarboxylase | | | cyanescens |
| SEQ ID | Protein | sequence | Tryptophan | PanCyPsiD | From | Panaeolus |
| NO: 78 | | of | decarboxylase | | | cyanescens |
| SEQ ID | DNA | sequence | UGT | Cs73Y | From | Crocus sativus |
| NO: 79 | | of | | | | |
| SEQ ID | Protein | sequence | UGT | Cs73Y | From | Crocus sativus |
| NO: 80 | | of | | | | |
| SEQ ID | DNA | sequence | UGT | Pt73Y | From | Populus trichocarpa |
| NO: 81 | | of | | | | |
| SEQ ID | Protein | sequence | UGT | Pt73Y | From | Populus trichocarpa |
| NO: 82 | | of | | | | |
| SEQ ID | DNA | sequence | UGT | Ha88B_2 | From | Helianthus annuus |
| NO: 83 | | of | | | | |
| SEQ ID | Protein | sequence | UGT | Ha88B_2 | From | Helianthus annuus |
| NO: 84 | | of | | | | |
| SEQ ID | DNA | sequence | UGT | PtIGS | From | Persicaria tinctoria |
| NO: 85 | | of | | | | |
| SEQ ID | Protein | sequence | UGT | PtIGS | From | Persicaria tinctoria |
| NO: 86 | | of | | | | |
| SEQ ID | DNA | sequence | Hydroxylase | PcPsiH | From | Psilocybe cubensis |
| NO: 87 | | of | | | | |
| SEQ ID | Protein | sequence | Hydroxylase | PcPsiH | From | Psilocybe cubensis |
| NO: 88 | | of | | | | |
| SEQ ID | DNA | sequence | Hydroxylase | PsPsiH1 | From | Psilocybe serbica |
| NO: 89 | | of | | | | |
| SEQ ID | Protein | sequence | Hydroxylase | PsPsiH1 | From | Psilocybe serbica |
| NO: 90 | | of | | | | |
| SEQ ID | DNA | sequence | Hydroxylase | PsPsiH2 | From | Psilocybe serbica |
| NO: 91 | | of | | | | |
| SEQ ID | Protein | sequence | Hydroxylase | PsPsiH2 | From | Psilocybe serbica |
| NO: 92 | | of | | | | |
| SEQ ID | DNA | sequence | Hydroxylase | PanCyPsiH | From | Panaeolus |
| NO: 93 | | of | | | | cyanescens |
| SEQ ID | Protein | sequence | Hydroxylase | PanCyPsiH | From | Panaeolus |
| NO: 94 | | of | | | | cyanescens |
| SEQ ID | DNA | sequence | Hydroxylase | OsT5H | From | Orzya Sativa |
| NO: 95 | | of | | | | |
| SEQ ID | Protein | sequence | Hydroxylase | OsT5H | From | Orzya Sativa |
| NO: 96 | | of | | | | |
| SEQ ID | DNA | sequence | Hydroxylase | PtFMO | From | Persicaria tinctoria |
| NO: 97 | | of | | | | |
| SEQ ID | Protein | sequence | Hydroxylase | PtFMO | From | Persicaria tinctoria |
| NO: 98 | | of | | | | |
| SEQ ID | DNA | sequence | Hydroxylase | Til10H | From | Tabernanthe iboga |
| NO: 99 | | of | | | | |
| SEQ ID | Protein | sequence | Hydroxylase | Til10H | From | Tabernanthe iboga |
| NO: 100 | | of | | | | |
| SEQ ID | DNA | sequence | CPR | PcCPR | From | Psilocybe cubensis |
| NO: 101 | | of | | | | |
| SEQ ID | Protein | sequence | CPR | PcCPR | From | Psilocybe cubensis |
| NO: 102 | | of | | | | |
| SEQ ID | DNA | sequence | CPR | PsCPR | From | Psilocybe serbica |
| NO: 103 | | of | | | | |
| SEQ ID | Protein | sequence | CPR | PsCPR | From | Psilocybe serbica |
| NO: 104 | | of | | | | |
| SEQ ID | DNA | sequence | CPR | PanCyCPR | From | Panaeolus |
| NO: 105 | | of | | | | cyanescens |
| SEQ ID | Protein | sequence | CPR | PanCyCPR | From | Panaeolus |
| NO: 106 | | of | | | | cyanescens |
| SEQ ID | DNA | sequence | CPR | CrCPR1 | From | Catharanthus roseus |
| NO: 107 | | of | | | | |
| SEQ ID | Protein | sequence | CPR | CrCPR1 | From | Catharanthus roseus |
| NO: 108 | | of | | | | |
| SEQ ID | DNA | sequence | CPR | CrCPR2 | From | Catharanthus roseus |
| NO: 109 | | of | | | | |
| SEQ ID | Protein | sequence | CPR | CrCPR2 | From | Catharanthus roseus |
| NO: 110 | | of | | | | |
| SEQ ID | DNA | sequence | CPR | FoCPR | From | Fusarium oxysporum |
| NO: 111 | | of | | | | |
| SEQ ID | Protein | sequence | CPR | FoCPR | From | Fusarium oxysporum |
| NO: 112 | | of | | | | |
| SEQ ID | DNA | sequence | O-methyl transferase | AtCOMT1 | From | Arabidopsis thaliana |
| NO: 113 | | of | | | | |
| SEQ ID | Protein | sequence | O-methyl transferase | AtCOMT1 | From | Arabidopsis thaliana |
| NO: 114 | | of | | | | |
| SEQ ID | DNA | sequence | O-methyl transferase | AtIGMT1 | From | Arabidopsis thaliana |
| NO: 115 | | of | | | | |
| SEQ ID | Protein | sequence | O-methyl transferase | AtIGMT1 | From | Arabidopsis thaliana |
| NO: 116 | | of | | | | |
| SEQ ID | DNA | sequence | O-methyl transferase | HsASMT | From | Homo sapiens |
| NO: 117 | | of | | | | |
| SEQ ID | Protein | sequence | O-methyl transferase | HsASMT | From | Homo sapiens |
| NO: 118 | | of | | | | |
| SEQ ID | DNA | sequence | O-methyl transferase | TiN10OMT | From | Tabernanthe iboga |
| NO: 119 | | of | | | | |
| SEQ ID | Protein | sequence | O-methyl transferase | TiN10OMT | From | Tabernanthe iboga |
| NO: 120 | | of | | | | |
| SEQ ID | DNA | sequence | N-methyl transferase | OcINMT | From | Oryctolagus cuniculus |
| NO: 121 | | of | | | | |
| SEQ ID | Protein | sequence | N-methyl transferase | OcINMT | From | Oryctolagus cuniculus |
| NO: 122 | | of | | | | |
| SEQ ID | DNA | sequence | N-methyl transferase | PcPsiM | From | Psilocybe cubensis |
| NO: 123 | | of | | | | |
| SEQ ID | Protein | sequence | N-methyl transferase | PcPsiM | From | Psilocybe cubensis |
| NO: 124 | | of | | | | |
| SEQ ID | DNA | sequence | N-methyl transferase | PsPsiM | From | Psilocybe serbica |
| NO: 125 | | of | | | | |
| SEQ ID | Protein | sequence | N-methyl transferase | PsPsiM | From | Psilocybe serbica |
| NO: 126 | | of | | | | |
| SEQ ID | DNA | sequence | N-methyl transferase | PanCyPsiM | From | Panaeolus |
| NO: 127 | | of | | | | cyanescens |
| SEQ ID | Protein | sequence | N-methyl transferase | PanCyPsiM | From | Panaeolus |
| NO: 128 | | of | | | | cyanescens |
| SEQ ID | DNA | sequence | N-methyl transferase | PcPsiM(H210A) | From | Psilocybe cubensis |
| NO: 129 | | of | | | | |
| SEQ ID | Protein | sequence | N-methyl transferase | PcPsiM(H210A) | From | Psilocybe cubensis |
| NO: 130 | | of | | | | |
| SEQ ID | DNA | sequence | N-methyl transferase | PsTrpM | From | Psilocybe serbica |
| NO: 131 | | of | | | | |
| SEQ ID | Protein | sequence | N-methyl transferase | PsTrpM | From | Psilocybe serbica |
| NO: 132 | | of | | | | |
| SEQ ID | DNA | sequence | N-methyl transferase | MsEgtD (M252A, | From | Mycobacterium |
| NO: 133 | | of | | E282A) | | smegmatis |
| SEQ ID | Protein | sequence | N-methyl transferase | MsEgtD (M252A, | From | Mycobacterium |
| NO: 134 | | of | | E282A) | | smegmatis |
| SEQ ID | DNA | sequence | N-methyl transferase | CsSNMT | From | Citrus sinensis |
| NO: 135 | | of | | | | |
| SEQ ID | Protein | sequence | N-methyl transferase | CsSNMT | From | Citrus sinensis |
| NO: 136 | | of | | | | |
| SEQ ID | DNA | sequence | N-methyl transferase | CsSNMT1(ΔN-term) | From | Citrus sinensis |
| NO: 137 | | of | | | | |
| SEQ ID | Protein | sequence | N-methyl transferase | CsSNMT1(ΔN-term) | From | Citrus sinensis |
| NO: 138 | | of | | | | |
| SEQ ID | DNA | sequence | C-methyl transferase | SITsrM | From | Streptomyces |
| NO: 139 | | of | | | | laurentii |
| SEQ ID | Protein | sequence | C-methyl transferase | SITsrM | From | Streptomyces |
| NO: 140 | | of | | | | laurentii |
| SEQ ID | DNA | sequence | Acetyl transferase | BtAANAT | From | Bos Taurus |
| NO: 141 | | of | | | | |
| SEQ ID | Protein | sequence | Acetyl transferase | BtAANAT | From | Bos Taurus |
| NO: 142 | | of | | | | |
| SEQ ID | DNA | sequence | Syntase | OpSTR | From | Ophiorrhiza pumila |
| NO: 143 | | of | | | | |
| SEQ ID | Protein | sequence | Syntase | OpSTR | From | Ophiorrhiza pumila |
| NO: 144 | | of | | | | |
| SEQ ID | DNA | sequence | Syntase | RsSTR1 (V208A) | From | Rauvolfia serpentina |
| NO: 145 | | of | | | | |
| SEQ ID | Protein | sequence | Syntase | RsSTR1 (V208A) | From | Rauvolfia serpentina |
| NO: 146 | | of | | | | |
| SEQ ID | DNA | sequence | Syntase | CrSTR1 | From | Catharanthus roseus |
| NO: 147 | | of | | | | |
| SEQ ID | Protein | sequence | Syntase | CrSTR1 | From | Catharanthus roseus |
| NO: 148 | | of | | | | |
| SEQ ID | DNA | sequence | Syntase | CrSTR1 (D177A) | From | Catharanthus roseus |
| NO: 149 | | of | | | | |
| SEQ ID | Protein | sequence | Syntase | CrSTR1 (D177A) | From | Catharanthus roseus |
| NO: 150 | | of | | | | |
| SEQ ID | DNA | sequence | Syntase | MtMcbB | From | Marinactinospora |
| NO: 151 | | of | | | | thermotolerans |
| SEQ ID | Protein | sequence | Syntase | MtMcbB | From | Marinactinospora |
| NO: 152 | | of | | | | thermotolerans |
| SEQ ID | DNA | sequence | Syntase | MtMcbB (R72A, | From | Marinactinospora |
| NO: 153 | | of | | H87A) | | thermotolerans |
| SEQ ID | Protein | sequence | Syntase | MtMcbB (R72A, | From | Marinactinospora |
| NO: 154 | | of | | H87A) | | thermotolerans |
| SEQ ID | DNA | sequence | Kinase | PcPsiK | From | Psilocybe cubensis |
| NO: 155 | | of | | | | |
| SEQ ID | Protein | sequence | Kinase | PcPsiK | From | Psilocybe cubensis |
| NO: 156 | | of | | | | |
| SEQ ID | DNA | sequence | Kinase | PsPsiK | From | Psilocybe serbica |
| NO: 157 | | of | | | | |
| SEQ ID | Protein | sequence | Kinase | PsPsiK | From | Psilocybe serbica |
| NO: 158 | | of | | | | |
| SEQ ID | DNA | sequence | Kinase | PanCyPsiK | From | Panaeolus |
| NO: 159 | | of | | | | cyanescens |
| SEQ ID | Protein | sequence | Kinase | PanCyPsiK | From | Panaeolus |
| NO: 160 | | of | | | | cyanescens |
| SEQ ID | DNA | sequence | Cin trans (N-hydroxy- | CaSHT | From | Capsicum annuum |
| NO: 161 | | of | cinnamoyl transferase) | | | |
| SEQ ID | Protein | sequence | Cin trans (N-hydroxy- | CaSHT | From | Capsicum annuum |
| NO: 162 | | of | cinnamoyl transferase) | | | |
| SEQ ID | DNA | sequence | Phosphatase | PcPsiL | From | Psilocybe cubensis |
| NO: 163 | | of | | | | |
| SEQ ID | Protein | sequence | Phosphatase | PcPsiL | From | Psilocybe cubensis |
| NO: 164 | | of | | | | |
| SEQ ID | DNA | sequence | Lacccase | PcPsiP | From | Psilocybe cubensis |
| NO: 165 | | of | | | | |
| SEQ ID | Protein | sequence | Lacccase | PcPsiP | From | Psilocybe cubensis |
| NO: 166 | | of | | | | |
| SEQ ID | DNA | sequence | Halogenase | CcCmdE | From | Chondromyces |
| NO: 167 | | of | | | | crocatus |
| SEQ ID | Protein | sequence | Halogenase | CcCmdE | From | Chondromyces |
| NO: 168 | | of | | | | crocatus |
| SEQ ID | DNA | sequence | Halogenase | SrPyrH | From | Streptomyces |
| NO: 169 | | of | | | | rugosporus |
| SEQ ID | Protein | sequence | Halogenase | SrPyrH | From | Streptomyces |
| NO: 170 | | of | | | | rugosporus |
| SEQ ID | DNA | sequence | Halogenase | Stth | From | Streptomyces |
| NO: 171 | | of | | | | toxytricini |
| SEQ ID | Protein | sequence | Halogenase | Stth | From | Streptomyces |
| NO: 172 | | of | | | | toxytricini |
| SEQ ID | DNA | sequence | Halogenase | LaRebH | From | Lechevalieria |
| NO: 173 | | of | | | | aerocolonigenes |
| SEQ ID | Protein | sequence | Halogenase | LaRebH | From | Lechevalieria |
| NO: 174 | | of | | | | aerocolonigenes |
| SEQ ID | DNA | sequence | Lyase | EcTnaA | From | Escherichia coli |
| NO: 175 | | of | | | | |
| SEQ ID | Protein | sequence | Lyase | EcTnaA | From | Escherichia coli |
| NO: 176 | | of | | | | |
| SEQ ID | DNA | sequence | P450 monooxygesase | SsTxtE | From | Streptomyces scabies |
| NO: 177 | | of | | | | |
| SEQ ID | Protein | sequence | P450 monooxygesase | SsTxtE | From | Streptomyces scabies |
| NO: 178 | | of | | | | |
| SEQ ID | DNA | sequence | Tryptophan synthase | PcTrpB | From | Psilocybe cubensis |
| NO: 179 | | of | | | | |
| SEQ ID | Protein | sequence | Tryptophan synthase | PcTrpB | From | Psilocybe cubensis |
| NO: 180 | | of | | | | |
| SEQ ID | DNA | sequence | Tryptophan synthase | PcTrpB (M439T, | From | Psilocybe cubensis |
| NO: 181 | | of | | N459D) | | |
| SEQ ID | Protein | sequence | Tryptophan synthase | PcTrpB (M439T, | From | Psilocybe cubensis |
| NO: 182 | | of | | N459D) | | |
| SEQ ID | DNA | sequence | C-24(28) sterol reductase | ERG4 | From | Saccharomyces |
| NO: 183 | | of | | | | cerevisiae |
| SEQ ID | DNA | sequence | S-adenosylmethionine | SPE2 | From | Saccharomyces |
| NO: 184 | | of | decarboxylase | | | cerevisiae |
| SEQ ID | DNA | sequence | NADH kinase | POS5 | From | Saccharomyces |
| NO: 185 | | of | | | | cerevisiae |
| SEQ ID | Protein | sequence | NADH kinase | POS5 | From | Saccharomyces |
| NO: 186 | | of | | | | cerevisiae |
| SEQ ID | DNA | sequence | UGT | Ha72B | From | H. annuus |
| NO: 187 | | of | | | | |
| SEQ ID | Protein | sequence | UGT | Ha72B | From | H. annuus |
| NO: 188 | | of | | | | |
| SEQ ID | DNA | sequence | UGT | Ha72T | From | H. annuus |
| NO: 189 | | of | | | | |
| SEQ ID | Protein | sequence | UGT | Ha72T | From | H. annuus |
| NO: 190 | | of | | | | |
| SEQ ID | DNA | sequence | UGT | Sp72T | From | S. pennellii |
| NO: 191 | | of | | | | |
| SEQ ID | Protein | sequence | UGT | Sp72T | From | S. pennellii |
| NO: 192 | | of | | | | |
| SEQ ID | DNA | sequence | UGT | At71C2 | From | A. thaliana |
| NO: 193 | | of | | | | |
| SEQ ID | Protein | sequence | UGT | At71C2 | From | A. thaliana |
| NO: 194 | | of | | | | |
| SEQ ID | DNA | sequence | UGT | RsAS | From | R. serpentina |
| NO: 195 | | of | | | | |
| SEQ ID | Protein | sequence | UGT | RsAS | From | R. serpentina |
| NO: 196 | | of | | | | |
| SEQ ID | DNA | sequence | UGT | At72B1 | From | A. thaliana |
| NO: 197 | | of | | | | |
| SEQ ID | Protein | sequence | UGT | At72B1 | From | A. thaliana |
| NO: 198 | | of | | | | |
| SEQ ID | DNA | sequence | UGT | At71C1-Sr71E1_354 | From | A. thaliana-S. |
| NO: 199 | | of | | | | rebaudiana hybrid |
| SEQ ID | Protein | sequence | UGT | At71C1-Sr71E1_354 | From | A. thaliana-S. |
| NO: 200 | | of | | | | rebaudiana hybrid |
| SEQ ID | DNA | sequence | UGT | At73B5 | From | A. thaliana |
| NO: 201 | | of | | | | |
| SEQ ID | Protein | sequence | UGT | At73B5 | From | A. thaliana |
| NO: 202 | | of | | | | |
| SEQ ID | DNA | sequence | UGT | Pt73Y | From | P. trichocarpa |
| NO: 203 | | of | | | | |
| SEQ ID | Protein | sequence | UGT | Pt73Y | From | P. trichocarpa |
| NO: 204 | | of | | | | |
| SEQ ID | DNA | sequence | UGT | Sp72Q | From | S. pennellii |
| NO: 205 | | of | | | | |
| SEQ ID | Protein | sequence | UGT | Sp72Q | From | S. pennellii |
| NO: 206 | | of | | | | |
| SEQ ID | DNA | sequence | UGT | Si72V | From | S. indicum |
| NO: 207 | | of | | | | |
| SEQ ID | Protein | sequence | UGT | Si72V | From | S. indicum |
| NO: 208 | | of | | | | |
| SEQ ID | DNA | sequence | UGT | Ad72X | From | A. duranensis |
| NO: 209 | | of | | | | |
| SEQ ID | Protein | sequence | UGT | Ad72X | From | A. duranensis |
| NO: 210 | | of | | | | |
| SEQ ID | DNA | sequence | UGT | Zj71A | From | Z. jujube |
| NO: 211 | | of | | | | |
| SEQ ID | Protein | sequence | UGT | Zj71A | From | Z. jujube |
| NO: 212 | | of | | | | |
| SEQ ID | DNA | sequence | UGT | OsEUGT11 | From | O. sativa |
| NO: 213 | | of | | | | |
| SEQ ID | Protein | sequence | UGT | OsEUGT11 | From | O. sativa |
| NO: 214 | | of | | | | |
| SEQ ID | DNA | sequence | UGT | Tc74Z | From | T. cacao |
| NO: 215 | | of | | | | |
| SEQ ID | Protein | sequence | UGT | Tc74Z | From | T. cacao |
| NO: 216 | | of | | | | |
| SEQ ID | DNA | sequence | UGT | At73C5 | From | A. thaliana |
| NO: 217 | | of | | | | |
| SEQ ID | Protein | sequence | UGT | At73C5 | From | A. thaliana |
| NO: 218 | | of | | | | |
| SEQ ID | DNA | sequence | UGT | At76E11 | From | A. thaliana |
| NO: 219 | | of | | | | |
| SEQ ID | Protein | sequence | UGT | At76E11 | From | A. thaliana |
| NO: 220 | | of | | | | |
| SEQ ID | DNA | sequence | UGT | CrUGT-2 | From | C. roseus |
| NO: 221 | | of | | | | |
| SEQ ID | Protein | sequence | UGT | CrUGT-2 | From | C. roseus |
| NO: 222 | | of | | | | |
| SEQ ID | DNA | sequence | UGT | Eg85S | From | E. grandis |
| NO: 223 | | of | | | | |
| SEQ ID | Protein | sequence | UGT | Eg85S | From | E. grandis |
| NO: 224 | | of | | | | |
| SEQ ID | DNA | sequence | UGT | Si85B | From | S. indicum |
| NO: 225 | | of | | | | |
| SEQ ID | Protein | sequence | UGT | Si85B | From | S. indicum |
| NO: 226 | | of | | | | |
| SEQ ID | DNA | sequence | UGT | Cs73Y | From | C. sativus |
| NO: 227 | | of | | | | |
| SEQ ID | Protein | sequence | UGT | Cs73Y | From | C. sativus |
| NO: 228 | | of | | | | |
| SEQ ID | DNA | sequence | UGT | Ha74B | From | H. annuus |
| NO: 229 | | of | | | | |
| SEQ ID | Protein | sequence | UGT | Ha74B | From | H. annuus |
| NO: 230 | | of | | | | |
| SEQ ID | DNA | sequence | UGT | Ha76H_2 | From | H. annuus |
| NO: 231 | | of | | | | |
| SEQ ID | Protein | sequence | UGT | Ha76H_2 | From | H. annuus |
| NO: 232 | | of | | | | |
| SEQ ID | DNA | sequence | UGT | Bv73P | From | B. vulgaris |
| NO: 233 | | of | | | | |
| SEQ ID | Protein | sequence | UGT | Bv73P | From | B. vulgaris |
| NO: 234 | | of | | | | |
| SEQ ID | DNA | sequence | UGT | Cp73B | From | C. papaya |
| NO: 235 | | of | | | | |
| SEQ ID | Protein | sequence | UGT | Cp73B | From | C. papaya |
| NO: 236 | | of | | | | |
| SEQ ID | DNA | sequence | UGT | Ac73H | From | A. commosus |
| NO: 237 | | of | | | | |
| SEQ ID | Protein | sequence | UGT | Ac73H | From | A. commosus |
| NO: 238 | | of | | | | |
| SEQ ID | DNA | sequence | UGT | Qs85H | From | Q. suber |
| NO: 239 | | of | | | | |
| SEQ ID | Protein | sequence | UGT | Qs85H | From | Q. suber |
| NO: 240 | | of | | | | |
| SEQ ID | DNA | sequence | UGT | Vv83A | From | V. vinifera |
| NO: 241 | | of | | | | |
| SEQ ID | Protein | sequence | UGT | Vv83A | From | V. vinifera |
| NO: 242 | | of | | | | |
| SEQ ID | DNA | sequence | UGT | At71C1_At71C2_353 | From | A. thaliana-S. |
| NO: 243 | | of | | | | rebaudiana hybrid |
| SEQ ID | Protein | sequence | UGT | At71C1_At71C2_353 | From | A. thaliana-S. |
| NO: 244 | | of | | | | rebaudiana hybrid |
| SEQ ID | DNA | sequence | UGT | Pt72B | From | P. trichocarpa |
| NO: 245 | | of | | | | |
| SEQ ID | Protein | sequence | UGT | Pt72B | From | P. trichocarpa |
| NO: 246 | | of | | | | |
| SEQ ID | DNA | sequence | UGT | Cc91D1 | From | C. cardunculus |
| NO: 247 | | of | | | | |
| SEQ ID | Protein | sequence | UGT | Cc91D1 | From | C. cardunculus |
| NO: 248 | | of | | | | |
| SEQ ID | DNA | sequence | UGT | Pg91B1 | From | P. ginseng |
| NO: 249 | | of | | | | |
| SEQ ID | Protein | sequence | UGT | Pg91B1 | From | P. ginseng |
| NO: 250 | | of | | | | |
| SEQ ID | DNA | sequence | UGT | Ha91 | From | H. annuus |
| NO: 251 | | of | | | | |
| SEQ ID | Protein | sequence | UGT | Ha91 | From | H. annuus |
| NO: 252 | | of | | | | |
| SEQ ID | DNA | sequence | Cytochrome b5 | PanCyCYB5 | From | Panaeolus |
| NO: 253 | | of | | | | cyanescens |
| SEQ ID | Protein | sequence | Cytochrome b5 | PanCyCYB5 | From | Panaeolus |
| NO: 254 | | of | | | | cyanescens |
| SEQ ID | DNA | sequence | Tryptophan synthase | PanCyTrpB | From | Panaeolus |
| NO: 255 | | of | | | | cyanescens |
| SEQ ID | Protein | sequence | Tryptophan synthase | PanCyTrpB | From | Panaeolus |
| NO: 256 | | of | | | | cyanescens |

### REFERENCES

[0508] Gietz, R. D., & Woods, R. A. (2002). Transformation of yeast by lithium acetate/single-stranded carrier DNA/polyethylene glycol method. Methods in Enzymology, 350(2001), 87-96. https://doi.org/10.1016/SO076-6879(02)50957-5.
[0509] Krengel, F., Mijangos, M. V, Reyes-lezama, M., & Reyes-chilpa, R. (2019). Extraction and Conversion Studies of the Antiaddictive Alkaloids Coronaridine, Ibogamine, Voacangine, and Ibogaine from Two Mexican Tabernaemontana Species (Apocynaceae). https://doi.org/10.1002/cbdv.201900175.
[0510] Maury, J., Germann, S. M., Baallal Jacobsen, S. A., Jensen, N. B., Kildegaard, K. R., Herrgàrd, M. J., Schneider, K., Koza, A., Forster, J., Nielsen, J., & Borodina, I. (2016). EasyCloneMulti: A set of vectors for simultaneous and multiple genomic integrations in Saccharomyces cerevisiae. PLoS ONE, 11(3), 1-22. https:H/doi.org/10.1371/J*ourna1.pone.0150394.
[0511] Mikkelsen, M. D., Buron, L. D., Salomonsen, B., Olsen, C. E., Hansen, B. G., Mortensen, U. H., & Halkier, B. A. (2012). Microbial production of indolylglucosinolate through engineering of a multi-gene pathway in a versatile yeast expression platform. Metabolic Engineering, 14(2), 104-111. https://doi.org/10.1016/j.ymben.2012.01.006.
[0512] Janis Fricke, D. A. (2019). Enzymatic Route toward 6-Methylated Baeocystin and Psilocybin. ChemBioChem, 2824-2829.
[0513] Michael E. Lee, W. C. (2015). A Highly Characterized Yeast Toolkit for Modular, Multipart Assembly. ACS Synthetic Biology, 975-986.

### Examples

### Materials and Methods

### Materials

[0514] Chemicals used in the examples herein e.g. for buffers and substrates are commercial products of at least reagent grade.

### Background Strains

[0515] BY4741 is a common strain of S. cerevisiae derived from S288C and available e.g. from American Type Culture Collection (ATCC #200885). DH5a and XJb (DE3) are common strains of E. coli available from E.g. Zymo Research.

### Example 1—Construction of Genetically Modified S. cerevisiae Strains for De Novo Production of Tryptamine and Substituted Tryptamine Derivatives

### Part 1

[0516] High-level de novo production of tryptamine and substituted tryptamine derivatives in S. cerevisiae was achieved by introducing a heterologous tryptophan decarboxylase (CrTdc) allowing conversion of the native S. cerevisiae metabolite tryptophan into tryptamine. To further increase the flux towards tryptamine a series of native genes were deleted to reduce diversion of flux away from the target pathway, as well as to remove regulation of the tryptophan biosynthetic pathway. Native S. cerevisiae genes involved in the biosynthetic pathway were overexpressed as well as feedback insensitive mutants. Additionally, a heterologous fructose-6-phosphate “bypass” was introduced to divert flux away from central glycolysis and towards Erythrose 4-phosphate. Finally, to divert carbon flux away from central glycolysis and into the shikimate pathway, down regulation of CDCl9, PFK1 and PFK2 was performed by promoter replacement of the native promoters with truncated versions of the URA3 promoter. Truncation of the URA3 promoter resulted in a decrease in promoter activity thereby achieving a reduction in enzyme activity of the target genes. A general scheme of the tryptamine biosynthetic pathway is shown in FIG. 1.

[0517] Genes for the tryptamine biosynthetic pathway were integrated into pre-defined genomic “landing pads” using custom-made overexpression plasmids similar to the system described by (Mikkelsen et al., 2012). Linear integration fragments are produced by NotI digestion of custom designed plasmids containing strong constitutive S. cerevisiae promoters and terminators and are flanked by upstream and downstream homology regions to facilitate assembly by homologous recombination. To facilitate assembly of multiple integration plasmids at a single genomic locus, upstream and downstream homology arms are designed so that after NotI digestion (New England Bio Labs Inc.), linear integration fragments can recombine into a single linear integration fragment and integrate in the target genomic loci. To select for transformants that have successfully integrated the fragments of interest, an endonuclease such as MAD7 can be used as described above or alternatively a selection marker such as LEU2 can be incorporated into the linear integration fragments and transformed into S. cerevisiae strains that are auxotrophic for Leucine as is known in the art. To reduce the occurrence of false positives the selection marker can be split across 2 linear integration fragments such as Rec 1 and Rec 2 such that a functional LEU2 selection marker can only be generated upon successful homologous recombination of the Rec 1 and Rec 2 integration fragments as shown in FIG. 2.

[0518] Genes were codon-optimized for expression in yeast and synthesized and cloned into custom integration plasmids by Twist Biosciences (Table 1). After linearization by restriction digestion with NotI (New England Bio Labs Inc.) plasmids are transformed into S. cerevisiae according to (Gietz & Woods, 2002). Transformants are plated on selective media.

TABLE 1
Integration plasmids used to construct tryptamine and tryptamine
derivative producing S. cerevisiae strains.

| Plasmid name | SEQ ID NO |
|---|---|
| PL-444(Rec1-XI-5-LEU: OsT5H) | SEQ ID NO: 95 |
| PL-445(Rec2-LEU: FoCPR) | SEQ ID NO: 111 |
| PL-447(Rec5-XI-5: RgTdc) | SEQ ID NO: 69 |
| PL-448(Rec4: HsASMT) | SEQ ID NO: 117 |
| PL-462(Rec4: CsSNMT1) | SEQ ID NO: 135 |
| PL-478(Rec2-URA: BbXfpk) | SEQ ID NO: 1 |
| PL-479(Rec1-XII-1-URA: CkPta) | SEQ ID NO: 3 |
| PL-480(Rec5-XII-1: BsPrs) | SEQ ID NO: 15 |
| PL-481(Rec4: ARO1) | SEQ ID NO: 7 |
| PL-482(Rec5-XI-5: ARO2) | SEQ ID NO: 11 |
| PL-483(Rec1-XI-5-LEU2: CrTdc) | SEQ ID NO: 25 |
| PL-484(Rec3: EcAroL) | SEQ ID NO: 9 |
| PL-485(Rec4: POS5) | SEQ ID NO: 185 |
| PL-486(Rec2-LEU: ARO4 (K229L)) | SEQ ID NO: 5 |
| PL-487(Rec3: TRP2 (S65R, S76L)) | SEQ ID NO: 13 |
| PL-533(Rec 2-LEU: Til10H) | SEQ ID NO: 99 |
| PL-534(Rec 1-XI-5-LEU: TIN10OMT) | SEQ ID NO: 119 |
| PL-535(Rec 3x-XI-5: CrCPR1) | SEQ ID NO: 107 |
| PL-536(Rec 3x-XI-5: CrCPR2) | SEQ ID NO: 109 |
| PL-556(Rec1-XVI-21-URA: PcPsiD) | SEQ ID NO: 71 |
| PL-557(Rec1-XVI-21-URA: PsPsiD) | SEQ ID NO: 75 |
| PL-558(Rec1-XVI-21-URA: PanCyPsiD) | SEQ ID NO: 77 |
| PL-569(Rec 5-XVI-21: PcPsiH) | SEQ ID NO: 87 |
| PL-570(Rec 5-XVI-21: PsPsiH1) | SEQ ID NO: 89 |
| PL-571(Rec 5-XVI-21: PsPsiH2) | SEQ ID NO: 91 |
| PL-572(Rec 5-XVI-21: PanCyPsiH) | SEQ ID NO: 93 |
| PL-(X-4 MF: CrTdc) | SEQ ID NO: 25 |
| PL-(XII-5 MF: OsT5H-FoCpr) | SEQ ID NO: 95, 111 |
| PL-(X-2 Ass1 MF: CaSHT) | SEQ ID NO: 161 |
| PL-(Ass 2: AtPAL2-At4CH-AtATR2) | SEQ ID NO: 51, 53, 55 |
| PL-(X-2 Ass3: At4CL2 | SEQ ID NO: 57 |
| PL-(Ty1c-tURA3: CaSHT) | SEQ ID NO: 161 |
| PL-494(XV1-21 Int TRP4 Split KlUra + DR L) | SEQ ID NO: 17 |
| PL-495(XVI-21 Int Split KlUra + DR R) | NA |
| PL-500(Rec 2-URA: PcPsiK) | SEQ ID NO: 155 |
| PL-501(Rec 2-URA: PsPsiK) | SEQ ID NO: 157 |
| PL-502(Rec 2-URA: PanCyPsiK) | SEQ ID NO: 159 |
| PL-507(Rec 4: PcCPR) | SEQ ID NO: 101 |
| PL-508(Rec 4: PsCPR) | SEQ ID NO: 103 |
| PL-509(Rec 4: PanCyCPR) | SEQ ID NO: 105 |
| PL-510(Rec 3: PcPsiM) | SEQ ID NO: 123 |
| PL-511(Rec 3: PsPsiM) | SEQ ID NO: 125 |
| PL-512(Rec 3: PanCyPsiM) | SEQ ID NO: 127 |
| PL-513(Rec 3: PcPsiM (H210A)) | SEQ ID NO: 129 |
| PL-530(Rec 3: PcPsiL) | SEQ ID NO: 163 |
| PL-531(Rec 1-XI-5-LEU: EcTnaA) | SEQ ID NO: 175 |
| PL-581(Ass1-XII-2-SpHIS5: TRP4-TRP5) | SEQ ID NO: 17, 23 |
| PL-582(Single Int-XII-2-SpHIS5: TRP4-TRP5) | SEQ ID NO: 17, 23 |
| PL-583(Ass2: TRP1-TRP3) | SEQ ID NO: 19, 21 |
| PL-584(Ass3-XII-2: TRP2 (S65R, S76L)- ARO4 (K229L)) | SEQ ID NO: 13, 5 |
| PL-446(p413TEF: PsTrpM) | SEQ ID NO: 131 |
| PL-529(PcPsiP) | SEQ ID NO: 165 |

### Part 2

[0519] Alternatively, integration plasmids we're constructed based on the MoClo system similar to (Michael E. Lee, 2015). Here, DNA part libraries containing promoters, terminators, genes of interest, and overlapping homology arms (for genomic integration and homologous recombination with adjacent integration cassettes) were cloned into entry vectors using standard Type IIs BsmBI restriction cloning reactions. To construct full integration expression cassettes overexpressing a gene of interest with strong constitutive promoter and terminator and overlapping integration homology arms, entry part plasmids were combined in a one-pot Type IIs BsaI restriction cloning reaction to generate the final integration plasmid. Pre-defined genomic “landing pads” were used as integration sites as described above. Counter-selectable markers (e.g. URA3 and AmdS) were integrated along with expression cassettes of interest in order to select for transformants with correctly integrated cassettes. Marker cassettes were split into two halves and encoded on overlapping homology arms between integration cassettes so that correct integration of more than one integration set would be required for functional expression of the marker. Marker cassettes were flanked by 500 bp homologous sequences to facilitate counter selection of the marker (by plating on 5-FOA or fluoroacetamide). A list of MoClo based yeast integration plasmids used to overproduce tryptamine and other substituted tryptamine derivatives is given in Table 2.

TABLE 2
Additional MoClo based integration plasmids used to construct tryptamine
and tryptamine derivative producing S. cerevisiae strains.

| Plasmid name | SEQ ID NO |
|---|---|
| PL-1583 (MoClo: X-2 int At4CL2) | SEQ ID NO: 57 |
| PL-606(Single Int-XII-2-SpHIS5: TRP4) | SEQ ID NO: 17 |
| PL-646(MoClo: RIC1 Up-TRP2 (S65R, S76L)-Split KlUra3 + DR L) | SEQ ID NO: 13 |
| PL-647(MoClo: Split KlUra3 + DR R-ARO4 (K229L)-RIC1 Down) | SEQ ID NO: 5 |
| PL-660(MoClo: X-3-TRP1-Split KlUra + DR L) | SEQ ID NO: 19 |
| PL-661(MoClo: Split KlUra3 + DR R-TRP3-X-3) | SEQ ID NO: 21 |
| PL-688(MoClo: XVI-21 int-OsT5H-Split KlUra3 + DR L) | SEQ ID NO: 95 |
| PL-690(MoClo: Split KlUra3 + DR R-FoCPR-XVI-21 int) | SEQ ID NO: 111 |
| PL-862(MoClo: X-4 int-BtAANAT-Split AmdS + DR L) | SEQ ID NO: 141 |
| PL-866(MoClo: Split AmdS + DR R-HsASMT-X-4 int) | SEQ ID NO: 117 |
| PL-1864(MoClo: X-4 int-PcPsiK-split KlUra3 + DR L) | SEQ ID NO: 155 |
| PL-1865(MoClo: X-4 int-PanCyPsiK-split KlUra3 + DR L) | SEQ ID NO: 159 |
| PL-1874(MoClo: split KlUra3 + DR R hom-PcPsiM-X-4 int) | SEQ ID NO: 123 |
| PL-1876(MoClo: split KlUra3 + DR R-PanCyPsiM-X-4-int) | SEQ ID NO: 127 |
| PL-1782(XI-1 KlUra3: PcCPR-PcPsiH) | SEQ ID NO: 101, 87 |
| PL-1896(XI-1 KlUra3: PanCyCPR-PanCyPsiH) | SEQ ID NO: 105, 93 |
| PL-1893(MoClo: X-2 int-At71C2-AmdS-X-2 int) | SEQ ID NO: 193 |
| PL-1897(MoClo: X-2 int-PanCyCyB5-KlUra3-X-2 int) | SEQ ID NO: 253 |
| PL-747(MoClo: XVI-21 int-PcPsiK- KlUra3 + DR L) | SEQ ID NO: 155 |
| PL-749(MoClo: KlUra3 + DR R-PcPsiM-XVI-21 int) | SEQ ID NO: 123 |
| PL-1720(MoClo: XVI-21 int-PanCyPsiK- KlUra3 + DR L) | SEQ ID NO: 159 |
| PL-1721(MoClo: KlUra3 + DR R-PanCyPsiM-XVI-21 int) | SEQ ID NO: 123 |
| PL-1722(MoClo: split KlUra3 + DR R hom-PcPsiM(H210A)-X-4 int) | SEQ ID NO: 129 |

[0520] Native S. cerevisiae genes were deleted by marker replacement in S. cerevisiae strains which were auxotrophic for essential amino acids e.g., BY4741. Deletion cassettes were prepared by PCR amplification of auxotrophic marker cassettes with primers which included upstream and downstream homology to the coding region of the gene of interest to be deleted. Subsequent transformation of the integration cassette into S. cerevisiae strains and selection on media lacking the required amino acid resulted in integration of the marker cassette at the gene of interest. In some cases, additional direct repeats were introduced flanking the marker cassette to subsequently counter select the marker for repeated use. E.g. the Ura3 cassette was flanked with direct repeats so that the marker could be looped out upon incubation of the S. cerevisiae strain on media containing 5-Fluoroorotic acid (5-FOA). A diagram demonstrating PCR amplification of knockout cassettes is shown in FIG. 3. Finally, in some cases an endonuclease such as MAD7 was used to induce a DNA break at a gene of interest and the gene removed by replacement with a DNA cassette consisting of DNA flanking the gene of interest. A list of gene deletion cassettes used in later examples is shown in Table 3.

TABLE 3
Gene deletion cassettes generated by PCR amplification of
auxotrophic markers from prototrophic S. cerevisiae.

| Knockout cassette | Target gene KO | SEQ ID NO |
|---|---|---|
| BB-500(HIS3 RIC1 hom) | RIC1 | SEQ ID NO: 33 |
| BB-501(MET17 GPP1 hom) | GPP1 | SEQ ID NO: 34 |
| BB-508(URA3 BNA2 hom) | BNA2 | SEQ ID NO: 35 |
| BB-509(URA3 ARO10 hom) | ARO10 | SEQ ID NO: 37 |
| BB-510(URA3 PDC5 hom) | PDC5 | SEQ ID NO: 38 |
| BB-511(URA3 HTZ1 hom) | HTZ1 | SEQ ID NO: 39 |
| BB-512(URA3 DIA3 hom) | DIA3 | SEQ ID NO: 40 |
| BB-513(URA3 PHO5 hom) | PHO5 | SEQ ID NO: 41 |
| BB-514(URA3 PHO12 hom) | PHO12 | SEQ ID NO: 42 |
| BB-515(URA3 PHO11 hom) | PHO11 | SEQ ID NO: 43 |
| BB-516(URA3 PHO3 hom) | PHO3 | SEQ ID NO: 44 |
| BB-517(URA3 CYS4 hom) | CYS4 | SEQ ID NO: 36 |
| BB-591(URA3 ERG4 hom) | ERG4 | SEQ ID NO: 183 |
| BB-592(URA3 SPE2 hom) | SPE2 | SEQ ID NO: 184 |

[0521] To produce substituted tryptamine derivatives de novo in S. cerevisiae, derivatizing enzymes were introduced into strains producing indole acceptors suchas tryptamine or other substituted tryptamines. To achieve this, genes encoding derivatizing enzymes were codon optimized, synthesized and cloned by Twist into centromeric plasmids derived from p415TEF containing a LEU2 auxotrophic marker. Expression plasmids were subsequently transformed into S. cerevisiae strains auxotrophic for leucine. Alternatively, genes were integrated into pre-defined genomic landing pads using integration cassettes as described above. Plasmids expressing derivatizing enzymes are listed in Table 1, Table 2 and Table 4. Plasmid DNA or DNA for integration into the genome was introduced into S. cerevisiae using the LiAc method known in the art.

### Example 2—Construction of Genetically Modified S. cerevisiae Strains for Production of Substituted Tryptamine Derivatives by Feeding Substituted Indole Acceptors

### Part 1

[0522] S. cerevisiae strains producing substituted tryptamine derivatives from substituted indole acceptors were constructed in three steps. In step one, genes encoding enzymes catalysing the conversion of (substituted) indole to (substituted) tryptophan (Tryptophan synthase and Tryptophan synthase beta sub-unit) were codon optimized, synthesized and cloned by Twist into centromeric plasmids derived from p413TEF containing a HIS3 auxotrophic marker. Expression plasmids were subsequently transformed into S. cerevisiae strains auxotrophic for histidine. In step two, genes encoding enzymes catalysing the conversion of (substituted) tryptophan to (substituted) tryptamine (Tryptophan decarboxylase) were codon optimized and synthesized by Twist then cloned into Ty integration vectors with truncated Ura3 markers as described by (Maury et al., 2016) To drive expression of these tryptophan decarboxylase genes the galactose inducible GAL10 promoter was used so that the enzymes would only be active in media containing galactose. Integration plasmids were subsequently transformed into S. cerevisiae strains auxotrophic for uracil. In step three, genes encoding enzymes catalysing the conversion of (substituted) tryptamine to (substituted) tryptamine derivatives (derivatising enzymes) were codon optimized, synthesized and cloned by Twist into centromeric plasmids derived from p415TEF containing a LEU2 auxotrophic marker. Expression plasmids were subsequently transformed into S. cerevisiae strains auxotrophic for leucine. Different combinations of genes from each of the three steps can be used to produce a range of substituted tryptamine derivatives.

TABLE 4
Expression plasmids used to construct
substituted indole conversion strains.

| | |
|---|---|
| Plasmid name | SEQ ID NO |

(Substituted) indole to (substituted) tryptophan

| | |
|---|---|
| PL-449(p413TEF: PfTrpB(2B9)) | SEQ ID NO: 59 |
| p413TEF (SeTrpB) | SEQ ID NO: 61 |
| p413TEF (PfTrpB) | SEQ ID NO: 63 |
| p413TEF (TRP5) | SEQ ID NO: 65 |
| p413TEF (TmTrpB (M145T, N167D)) | SEQ ID NO: 67 |
| p413TEF (PcTrpB (M439T, N459D) | SEQ ID NO: 181 |

(Substituted) tryptophan to (substituted) tryptamine

| | |
|---|---|
| pTy-tUra3 (CrTdc) | SEQ ID NO: 25 |
| pTy-tUra3 (RgTdc) | SEQ ID NO: 69 |
| pTy-tUra3 (PcPsiD) | SEQ ID NO: 71 |
| pTy-tUra3 (PcncAAAD) | SEQ ID NO: 73 |
| pTy-tUra3 (PanCyPsiD) | SEQ ID NO: 77 |

(Substituted) tryptamine to (substituted) tryptamine derivative

| | |
|---|---|
| PL-537(p416TEF: PtIGS) | SEQ ID NO: 85 |
| p415TEF (CsSNMT1) | SEQ ID NO: 135 |
| p415TEF (HsASMT) | SEQ ID NO: 117 |

[0523] A list of all S. cerevisiae strains constructed by Example 1 and 2 is shown in Table 5 and Table 6 along with the corresponding genotypes. For simplicity the constitutive terminators used to overexpress each gene is omitted but consisted of any one of the following strong terminators, tADH1, tCYC1, tSSA1, tENO2, tTDH1, tPGK1, tTDH2, tPG11.

TABLE 5
S. cerevisiae strains constructed in Example 1 and 2.

| Strain | |
|---|---|
| name | Genotype |
| BY4741 | MATa his3Δ1 leu2Δ0 met15Δ0 ura3Δ0 |
| SC-17 | MATa his3Δ1 leu2Δ0 met15Δ0 ura3Δ0 XI-5::(pTDH3 −> CrTdc, KlLeu2 <− pKlLeu2, pTEF1 −> ARO4(K229L), TRP2 (S65R, |
| | S76L) <− pTEF2, pFBA1 −> ARO1, ARO2 <− pPGK1) |
| SC-18 | MATa his3Δ1 leu2Δ0 met15Δ0 ura3Δ0 XI-5::(pTDH3 −> CrTdc, KlLeu2 <− pKlLeu2, pTEF1 −> ARO4(K229L), TRP2 (S65R, |
| | S76L) <− pTEF2, pFBA1 −> ARO1, ARO2 <− pPGK1), XII-1::(pTDH3 −> CkPta, KlUra3 <− pKlUra3, pTEF1 −> BbXfpk, EcAroL <− |
| | pTEF2, BsPrs <− pPGK1) |
| SC-25 | MATa his3Δ1 leu2Δ0 met15Δ0 ura3Δ0 XI-5::(pTDH3 −> CrTdc, KlLeu2 <− pKlLeu2, pTEF1 −> ARO4(K229L), TRP2 (S65R, |
| | S76L) <− pTEF2, pFBA1 −> ARO1, ARO2 <− pPGK1), XII-1::(pTDH3 −> CkPta, KlUra3 <− pKlUra3, pTEF1 −> BbXfpk, EcAroL <− |
| | pTEF2, BsPrs <− pPGK1), gpp1Δ::HIS3 |
| SC-27 | MATa his3Δ1 leu2Δ0 met15Δ0 ura3Δ0 XI-5::(pTDH3 −> CrTdc, KlLeu2 <− pKlLeu2, pTEF1 −> ARO4(K229L), TRP2 (S65R, |
| | S76L) <− pTEF2, pFBA1 −> ARO1, ARO2 <− pPGK1), XII-1::(pTDH3 −> CkPta, KlUra3 <− pKlUra3, pTEF1 −> BbXfpk, EcAroL <− |
| | pTEF2, BsPrs <− pPGK1), gpp1Δ::HIS3, ric1Δ::MET17 |
| SC-43 | MATa his3Δ1 leu2Δ0 met15Δ0 ura3Δ0 XI-5::(pTDH3 −> CrTdc, KlLeu2 <− pKlLeu2, pTEF1 −> ARO4(K229L), TRP2 (S65R, |
| | S76L) <− pTEF2, pFBA1 −> ARO1, ARO2 <− pPGK1), XII-1::(pTDH3 −> CkPta, pTEF1 −> BbXfpk, EcAroL <− pTEF2, BsPrs <− |
| | pPGK1), gpp1Δ::HIS3 |
| SC-44 | MATa his3Δ1 leu2Δ0 met15Δ0 ura3Δ0 XI-5::(pTDH3 −> CrTdc, KlLeu2 <− pKlLeu2, pTEF1 −> ARO4(K229L), TRP2 (S65R, |
| | S76L) <− pTEF2, pFBA1 −> ARO1, ARO2 <− pPGK1), XII-1::(pTDH3 −> CkPta, pTEF1 −> BbXfpk, EcAroL <− pTEF2, BsPrs <− |
| | pPGK1), gpp1Δ::HIS3, XV1-21::(pTDH3 −> TRP4, pKlUra3 −> KlUra3) |
| SC-21 | MATa his3Δ1 leu2Δ0 met15Δ0 ura3Δ0 XI-5::(pTDH3 −> OsT5H, KlLeu2 <− pKlLeu2, pTEF1 −> FoCPR, RgTdc <− pPGK1) |
| SC-41 | MATa his3Δ1 leu2Δ0 met15Δ0 ura3Δ0 P413TEF::(PfTrpB(2B9)), Ty1C::(pGAL10 −> RgTdc, pURA3d −> URA3) |
| SC-34 | MATa his3Δ1 leu2Δ0 met15Δ0 ura3Δ0 XI-5::(pTDH3 −> OsT5H, KlLeu2 <− pKlLeu2, pTEF1 −> FoCPR, pFBA1 −> HsASMT, |
| | RgTdc <− pPGK1) |
| SC-36 | MATa his3Δ1 leu2Δ0 met15Δ0 ura3Δ2 XI-5::(pTDH3 −> OsT5H, KlLeu2 <− pKlLeu2, pTEF1 −> FoCPR, pFBA1 −> CsSNMT1, |
| | RgTdc <− pPGK1) |
| ST-4CS1 | Mat alpha, ura3Delta::X-4::(pTEF −> CrTdc), XII-5::(OsT5H <− pPGK1-pTEF −> FoCpr), X-2::(CaSHT <− pPGK1, AtPAL2 <− |
| | pTPl1-pPDC1 −> AtC4H-AtATR2, pPDC1 −> At4CL2), |
| ST-4CS2 | Mat alpha, ura3Delta::X-4::(pTEF −> CrTdc), XII-5::(OsT5H <− pPGK1-pTEF −> FoCpr), X-2::(CaSHT <− pPGK1, AtPAL2 <− |
| | pTPl1-pPDC1 −> AtC4H-AtATR2, pPDC1 −> At4CL2), Ty1C::(URA3d-CaSHT <− pPGK1) |

### Part 2

[0524] An additional list of S. cerevisiae strains constructed in Example 1 and 2 is given in Table 6.

TABLE 6
Additional S. cerevisiae strains constructed in Example 1 and 2.

| Strain name | Genotype |
|---|---|
| SC-NFC | Mat alpha, ura3Delta:: X-4::(pTEF−>CrTdc), XII-5::(OsT5H<−pPGK1 − pTEF−>FoCpr), X- |
| | 2::(Nt4CL2<−pTEF1), Ty1C::(URA3d-CaSHT<−pPGK1) |
| SC-49 | MATa his3Δ1 leu2Δ0 met15Δ0 ura3Δ0 XI-5::(pTDH3−>CrTdc, KiLeu2<−pKiLeu2, |
| | pTEF1−>ARO4(K229L), TRP2 (S65R, S76L)<−pTEF2, pFBA1−>ARO1, ARO2<−pPGK1), |
| | XII-1::(pTDH3−>CkPta, pTEF1−>BbXfpk, EcAroL<−pTEF2, BsPrs<−pPGK1), gpp1Δ::MET17, |
| | XII-2::(pTDH3−>TRP4, SpHis5) |
| SC-56 | MATa his3Δ1 leu2Δ0 met15Δ0 ura3Δ0 XI-5::(pTDH3−>CrTdc, KiLeu2<−pKiLeu2, |
| | pTEF1−>ARO4(K229L), TRP2 (S65R, S76L)<−pTEF2, pFBA1−>ARO1, ARO2<−pPGK1), |
| | XII-1::(pTDH3−>CkPta, pTEF1−>BbXfpk, EcAroL<−pTEF2, BsPrs<−pPGK1), gpp1Δ::MET17, |
| | XII-2::(pTDH3−>TRP4, SpHis5), aro10Δ::KIUra3 |
| SC-58 | MATa his3Δ1 leu2Δ0 met15Δ0 ura3Δ0 XI-5::(pTDH3−>CrTdc, KiLeu2<−piLeu2, |
| | pTEF1−>ARO4(K229L), TRP2 (S65R, S76L)<−pTEF2, pFBA1−>ARO1, ARO2<−pPGK1), |
| | XII-1::(pTDH3−>CkPta, pTEF1−>BbXfpk, EcAroL<−pTEF2, BsPrs<−pPGK1), gpp1Δ::MET17, |
| | XII-2::(pTDH3−>TRP4, SpHis5), aro10Δ |
| SC-59 | MATa his3Δ1 leu2Δ0 met15Δ0 ura3Δ0 XI-5: (pTDH3−>CrTdc, KiLeu2<−pKiLeu2, |
| | pTEF1−>ARO4(K229L), TRP2 (S65R, S76L)<−pTEF2, pFBA1−>ARO1, ARO2<−pPGK1), |
| | XII-1::(pTDH3−>CkPta, pTEF1−>BbXfpk, EcAroL<−pTEF2, BsPrs<−pPGK1), gpp1Δ::MET17, |
| | XII-2::(pTDH3−>TRP4, SpHis5), aro10Δ, ric1Δ::(pTDH3−>TRP2(S65R, S76L), pPGK1−>ARO4 |
| | (K229L), KIUra3) |
| SC-60 | MATa his3Δ1 leu2Δ0 met15Δ0 ura3Δ0 XI-5::(pTDH3−>CrTdc, KiLeu2<−pKiLeu2, |
| | pTEF1−>ARO4(K229L), TRP2 (S65R, S76L)<−pTEF2, pFBA1−>ARO1, ARO2<−pPGK1), |
| | XII-1::(pTDH3−>CkPta, pTEF1−>BbXfpk, EcAroL<−pTEF2, BsPrs<−pPGK1), gpp1Δ::MET17, |
| | XII-2::(pTDH3−>TRP4, SpHis5), aro10Δ, ric1Δ::(pTDH3−>TRP2(S65R, S76L), pPGK1−>ARO4 (K229L)) |
| SC-62 | MATa his3Δ1 leu2Δ0 met15Δ0 ura3Δ0 XI-5::(pTDH3−>CrTdc, KiLeu2<−pKiLeu2, |
| | pTEF1−>ARO4(K229L), TRP2 (S65R, S76L)<−pTEF2, pFBA1−>ARO1, ARO2<−pPGK1), |
| | XII-1::(pTDH3−>CkPta, pTEF1−>BbXfpk, EcAroL<−pTEF2, BsPrs<−pPGK1), gpp1Δ::MET17, |
| | XII-2::(pTDH3−>TRP4, SpHis5), aro10Δ, ric1Δ::(pTDH3−>TRP2(S65R, S76L), pPGK1−>ARO4 (K229L)), |
| | X-3::(pTEF2−>TRP1, pCCW12−>TRP3, KIUra3) |
| SC-106 | MATa his3Δ1 leu2Δ0 met15Δ0 ura3Δ0 XI-5::(pTDH3−>CrTdc, KiLeu2<−pKiLeu2, |
| | pTEF1−>ARO4(K229L), TRP2 (S65R, S76L)<−pTEF2, pFBA1−>ARO1, ARO2<−pPGK1), |
| | XII-1::(pTDH3−>CkPta, pTEF1−>BbXfpk, EcAroL<−pTEF2, BsPrs<−pPGK1), gpp1Δ::MET17, |
| | XII-2::(pTDH3−>TRP4, SpHis5), aro10Δ, ric1Δ::(pTDH3−>TRP2(S65R, S76L), pPGK1−>ARO4 (K229L)), |
| | X-3::(pTEF2−>TRP1, pCCW12−>TRP3), |
| SC-75 | MATa his3Δ1 leu2Δ0 met15Δ0 ura3Δ0 XI-5::(pTDH3−>CrTdc, KiLeu2<−pKiLeu2, |
| | pTEF1−>ARO4(K229L), TRP2 (S65R, S76L)<−pTEF2, pFBA1−>ARO1, ARO2<−pPGK1), |
| | XII-1::(pTDH3−>CkPta, pTEF1−>BbXfpk, EcAroL<−pTEF2, BsPrs<−pPGK1), gpp1Δ::MET17, |
| | XII-2::(pTDH3−>TRP4, SpHis5), aro10Δ, ric1Δ::(pTDH3−>TRP2(S65R, S76L), pPGK1−>ARO4 (K229L)), |
| | X-3::(pTEF2−>TRP1, pCCW12−>TRP3), XVI-21::(pPGK1−>OsT5H, pTEF1−>FoCPR) |
| SC-259 | MATa his3Δ1 leu2Δ0 met15Δ0 ura3Δ0 XI-5::(pTDH3−>CrTdc, KiLeu2<−pKiLeu2, |
| | pTEF1−>ARO4(K229L), TRP2 (S65R, S76L)<−pTEF2, pFBA1−>ARO1, ARO2<−pPGK1), |
| | XII-1::(pTDH3−>CkPta, pTEF1−>BbXfpk, EcAroL<−pTEF2, BsPrs<−pPGK1), gpp1Δ::MET17, |
| | XII-2::(pTDH3−>TRP4, SpHis5), aro10Δ, ric1Δ::(pTDH3−>TRP2(S65R, S76L), pPGK1−>ARO4 (K229L)), |
| | X-3::(pTEF2−>TRP1, pCCW12−>TRP3), XVI-21::(pPGK1−>OsT5H) |
| SC-124 | MATa his3Δ1 leu2Δ0 met15Δ0 ura3Δ0 XI-5::(pTDH3−>CrTdc, KiLeu2<−pKiLeu2, |
| | pTEF1−>ARO4(K229L), TRP2 (S65R, S76L)<−pTEF2, pFBA1−>ARO1, ARO2<−pPGK1), |
| | XII-1::(pTDH3−>CkPta, pTEF1−>BbXfpk, EcAroL<−pTEF2, BsPrs<−pPGK1), gpp1Δ::MET17, |
| | XII-2::(pTDH3−>TRP4, SpHis5), aro10Δ, ric1Δ::(pTDH3−>TRP2(S65R, S76L), pPGK1−>ARO4 (K229L)), |
| | X-3::(pTEF2−>TRP1, pCCW12−>TRP3), XVI-21::(pPGK1−>OST5H, pTEF1−>FoCPR), X-4::(pTDH3−>BtAANT, |
| | pENO2−>HsASMT) |
| SC-268 | MATa his3Δ1 leu2Δ0 met15Δ0 ura3Δ0 XI-5::(pTDH3−>CrTdc, KiLeu2<−pKiLeu2, |
| | pTEF1−>ARO4(K229L), TRP2 (S65R, S76L)<−pTEF2, pFBA1−>ARO1, ARO2<−pPGK1), |
| | XII-1::(pTDH3−>CkPta, pTEF1−>BbXfpk, EcAroL<−pTEF2, BsPrs<−pPGK1), gpp1Δ::MET17, |
| | XII-2::(pTDH3−>TRP4, SpHis5), aro10, ric1Δ::(pTDH3−>TRP2(S65R, S76L), pPGK1−>ARO4 (K229L)), |
| | X-3::(pTEF2−>TRP1, pCCW12−>TRP3), X-4::(pTDH3−>PanCyPsik, pCCW12−>PanCyPsiM), |
| | XI-1::(pTEF1−>PanCyCPR, PanCyPsiH<−pPGK1, KIUra3) |
| SC-269 | MATa his3Δ1 leu2Δ0 met15Δ0 ura3Δ0 XI-5::(pTDH3−>CrTdc, KiLeu2<−pKiLeu2, |
| | pTEF1−>ARO4(K229L), TRP2 (S65R, S76L)<−pTEF2, pFBA1−>ARO1, ARO2<−pPGK1), |
| | XII-1::(pTDH3−>CkPta, pTEF1−>BbXfpk, EcAroL<−pTEF2, BsPrs<−pPGK1), gpp1Δ::MET17, |
| | XII-2::(pTDH3−>TRP4, SpHis5), aro10Δ, ric1Δ:(pTDH3−>TRP2(S65R, S76L), pPGK1−>ARO4 (K229L)), |
| | X-3::(pTEF2−>TRP1, pCCW12−>TRP3), X-4::(pTDH3−>PanCyPsiK, pCCW12−>PanCyPsiM), |
| | XI-1::(pTEF1−>PanCyCPR, PanCyPsiH<−pPGK1) |
| SC-275 | MATa his3Δ1 leu2Δ0 met15Δ0 ura3Δ0 XI-5::(pTDH3−>CrTdc, KiLeu2<−pKiLeu2, |
| | pTEF1−>ARO4(K229L), TRP2 (S65R, S76L)<−pTEF2, pFBA1−>ARO1, ARO2<−pPGK1), |
| | XII-1::(pTDH3−>CkPta, pTEF1−>BbXfpk, EcAroL<−pTEF2, BsPrs<−pPGK1), gpp1Δ::MET17, |
| | XII-2::(pTDH3−>TRP4, SpHis5), aro10Δ, ric1Δ::(pTDH3−>TRP2(S65R, S76L), pPGK1−>ARO4 (K229L)), |
| | X-3::(pTEF2−>TRP1, pCCW12−>TRP3), X-4::(pTDH3−>PcPsik, pCCW12−>PcPsiM), XI-1::(pTEF1−>PcCPR, |
| | PcPsiH<−pPGK1, KIUra3) |
| SC-276 | MATa his3Δ1 leu2Δ0 met15Δ0 ura3Δ0 XI-5::(pTDH3−>CrTdc, KiLeu2<−pKiLeu2, |
| | pTEF1−>ARO4(K229L), TRP2 (S65R, S76L)<−pTEF2, pFBA1−>ARO1, ARO2<−pPGK1), |
| | XII-1::(pTDH3−>CkPta, pTEF1−>BbXfpk, EcAroL<−pTEF2, BsPrs<−pPGK1), gpp1Δ::MET17, |
| | XII-2::(pTDH3−>TRP4, SpHis5), aro10Δ, ric1Δ::(pTDH3−>TRP2(S65R, S76L), pPGK1−>ARO4 (K229L)), |
| | X-3::(pTEF2−>TRP1, pCCW12−>TRP3), X-4::(pTDH3−>PcPsik, pCCW12−>PcPsiM), XI-1::(pTEF1−>PcCPR, |
| | PcPsiH<−pPGK1) |
| SC-301 | MATa his3Δ1 leu2Δ0 met15Δ0 ura3Δ0 XI-5::(pTDH3−>CrTdc, KiLeu2<−pKiLeu2, |
| | pTEF1−>ARO4(K229L), TRP2 (S65R, S76L)<−pTEF2, pFBA1−>ARO1, ARO2<−pPGK1), |
| | XII-1::(pTDH3−>CkPta, pTEF1−>BbXfpk, EcAroL<−pTEF2, BsPrs<−pPGK1), gpp1Δ::MET17, |
| | XII-2::(pTDH3−>TRP4, SpHis5), aro10Δ, ric1Δ::(pTDH3−>TRP2(S65R, S76L), pPGK1−>ARO4 (K229L)), |
| | X-3::(pTEF2−>TRP1, pCCW12−>TRP3), X-4::(pTDH3−>PcPsik, pCCW12−>PcPsiM), XI-1::(pTEF1−>PcCPR, |
| | PcPsiH<−pPGK1), pho3Δ::KIUra3 |
| SC-302 | MATa his3Δ1 leu2Δ0 met15Δ0 ura3Δ0 XI-5::(pTDH3−>CrTdc, KiLeu2<−pKiLeu2, |
| | pTEF1−>ARO4(K229L), TRP2 (S65R, S76L)<−pTEF2, pFBA1−>ARO1, ARO2<−pPGK1), |
| | XII-1::(pTDH3−>CkPta, pTEF1−>BbXfpk, EcAroL<−pTEF2, BsPrs<−pPGK1), gpp1Δ::MET17, |
| | XII-2::(pTDH3−>TRP4, SpHis5), aro10, ric1Δ::(pTDH3−>TRP2(S65R, S76L), pPGK1−>ARO4 (K229L)), |
| | X-3::(pTEF2−>TRP1, pCCW12−>TRP3), X-4::(pTDH3−>PcPsik, pCCW12−>PcPsiM), XI-1::(pTEF1−>PcCPR, |
| | PcPsiH<−pPGK1), dia3Δ::KIUra3 |
| SC-303 | MATa his3Δ1 leu2Δ0 met15Δ0 ura3Δ0 XI-5::(pTDH3−>CrTdc, KiLeu2<−pKiLeu2, |
| | pTEF1−>ARO4(K229L), TRP2 (S65R, S76L)<−pTEF2, pFBA1−>ARO1, ARO2<−pPGK1), |
| | XII-1::(pTDH3−>CkPta, pTEF1−>BbXfpk, EcAroL<−pTEF2, BsPrs<−pPGK1), gpp1Δ::MET17, |
| | XII-2::(pTDH3−>TRP4, SpHis5), aro10Δ, ric1Δ:(pTDH3−>TRP2(S65R, S76L), pPGK1−>ARO4 (K229L)), |
| | X-3::(pTEF2−>TRP1, pCCW12−>TRP3), X-4:(pTDH3−>PcPsik, pCCW12−>PcPsiM), XI-1::(pTEF1−>PcCPR, |
| | PcPsiH<−pPGK1), pho5Δ::KIUra3 |
| SC-382 | MATa his3Δ1 leu2Δ0 met15Δ0 ura3Δ0 XI-5:(pTDH3−>CrTdc, KiLeu2<−pKiLeu2, |
| | pTEF1−>ARO4(K229L), TRP2 (S65R, S76L)<−pTEF2, pFBA1−>ARO1, ARO2<−pPGK1), |
| | XII-1::(pTDH3−>CkPta, pTEF1−>BbXfpk, EcAroL<−pTEF2, BsPrs<−pPGK1), gpp1Δ::MET17, |
| | XII-2::(pTDH3−>TRP4, SpHis5), aro10Δ, ric1Δ::(pTDH3−>TRP2(S65R, S76L), pPGK1−>ARO4 (K229L)), |
| | X-3:(pTEF2−>TRP1, pCCW12−>TRP3), erg4Δ, |
| SC-402 | MATa his3Δ1 leu2Δ0 met15Δ0 ura3Δ0 XI-5::(pTDH3−>CrTdc, KiLeu2<−pKiLeu2, |
| | pTEF1−>ARO4(K229L), TRP2 (S65R, S76L)<−pTEF2, pFBA1−>ARO1, ARO2<−pPGK1), |
| | XII-1::(pTDH3−>CkPta, pTEF1−>BbXfpk, EcAroL<−pTEF2, BsPrs<−pPGK1), gpp1Δ::MET17, |
| | XII-2::(pTDH3−>TRP4, SpHis5), aro10Δ, ric1Δ::(pTDH3−>TRP2(S65R, S76L), pPGK1−>ARO4 (K229L)), |
| | X-3::(pTEF2−>TRP1, pCCW12−>TRP3), X-4::(pTDH3−>PcPsik, pCCW12−>PcPsiM), XI-1::(pTEF1−>PcCPR, |
| | PcPsiH<−pPGK1), X-2::(pTDH3−>At71C2, AmdS) |
| SC-412 | MATa his3Δ1 leu2Δ0 met15Δ0 ura3Δ0 XI-5::(pTDH3−>CrTdc, KiLeu2<−pKiLeu2, |
| | pTEF1−>ARO4(K229L), TRP2 (S65R, S76L)<−pTEF2, pFBA1−>ARO1, ARO2<−pPGK1), |
| | XII-1::(pTDH3−>CkPta, pTEF1−>BbXfpk, EcAroL<−pTEF2, BsPrs<−pPGK1), gpp1Δ::MET17, |
| | XII-2::(pTDH3−>TRP4, SpHis5), aro10Δ, ric1Δ::(pTDH3−>TRP2(S65R, S76L), pPGK1−>ARO4 (K229L)), |
| | X-3::(pTEF2−>TRP1, pCCW12−>TRP3), X-4::(pTDH3−>PcPsik, pCCW12−>PcPsiM), XI-1::(pTEF1−>PcCPR, |
| | PcPsiH<−pPGK1), pho12Δ::KIUra3 |
| SC-413 | MATa his3Δ1 leu2Δ0 met15Δ0 ura3Δ0 XI-5::(pTDH3−>CrTdc, KiLeu2<−pKiLeu2, |
| | pTEF1−>ARO4(K229L), TRP2 (S65R, S76L)<−pTEF2, pFBA1−>ARO1, ARO2<−pPGK1), |
| | XII-1::(pTDH3−>CkPta, pTEF1−>BbXfpk, EcAroL<−pTEF2, BsPrs<−pPGK1), gpp1Δ::MET17, |
| | XII-2::(pTDH3−>TRP4, SpHis5), aro10Δ, ric1Δ::(pTDH3−>TRP2(S65R, S76L), pPGK1−>ARO4 (K229L)), |
| | X-3::(pTEF2−>TRP1, pCCW12−>TRP3), X-4::(pTDH3−>PcPsik, pCCW12−>PcPsiM), XI-1::(pTEF1−>PcCPR, |
| | PcPsiH<−pPGK1), pho11Δ::KIUra3 |
| SC-394 | MATa his3Δ1 leu2Δ0 met15Δ0 ura3Δ0 X-2::(pTDH3−>At71C2, AmdS) |
| SC-403 | MATa his3Δ1 leu2Δ0 met15Δ0 ura3Δ0 XI-5::(pTDH3−>CrTdc, KiLeu2<−pKiLeu2, |
| | pTEF1−>ARO4(K229L), TRP2 (S65R, S76L)<−pTEF2, pFBA1−>ARO1, ARO2<−pPGK1), |
| | XII-1::(pTDH3−>CkPta, pTEF1−>BbXfpk, EcAroL<−pTEF2, BsPrs<−pPGK1), gpp1Δ::MET17, |
| | XII-2::(pTDH3−>TRP4, SpHis5), aro10Δ, ric1Δ:(pTDH3−>TRP2(S65R, S76L), pPGK1−>ARO4 (K229L)), |
| | X-3::(pTEF2−>TRP1, pCCW12−>TRP3), X-4::(pTDH3−>PanCyPsiK, pCCW12−>PanCyPsiM), |
| | XI-1::(pTEF1−>PanCyCPR, PanCyPsiH<−pPGK1), X-2::(pTDH3−>PanCyCYB5, KIUra3) |
| SC-270 | MATa his3Δ1 leu2Δ0 met15Δ0 ura3Δ0 XI-5::(pTDH3−>CrTdc, KiLeu2<−pKiLeu2, |
| | pTEF1−>ARO4(K229L), TRP2 (S65R, S76L)<−pTEF2, pFBA1−>ARO1, ARO2<−pPGK1), |
| | XII-1::(pTDH3−>CkPta, pTEF1−>BbXfpk, EcAroL<−pTEF2, BsPrs<−pPGK1), gpp1Δ::MET17, |
| | XII-2::(pTDH3−>TRP4, SpHis5), aro10, ric1Δ::(pTDH3−>TRP2(S65R, S76L), pPGK1−>ARO4 (K229L)), |
| | X-3::(pTEF2−>TRP1, pCCW12−>TRP3), X-4::(pTDH3−>PanCyPsik, pCCW12−>PanCyPsiM), |
| | XI-1::(pTEF1−>PanCyCPR, PanCyPsiH<−pPGK1), X-2::(pPGK1−>PanCyCYB5, KIUra3) |
| SC-415 | MATa his3Δ1 leu2Δ0 met15Δ0 ura3Δ0 XI-5::(pTDH3−>CrTdc, KiLeu2<−pKiLeu2, |
| | pTEF1−>ARO4(K229L), TRP2 (S65R, S76L)<−pTEF2, pFBA1−>ARO1, ARO2<−pPGK1), |
| | XII-1::(pTDH3−>CkPta, pTEF1−>BbXfpk, EcAroL<−pTEF2, BsPrs<−pPGK1), gpp1Δ::MET17, |
| | XII-2::(pTDH3−>TRP4, SpHis5), aro10Δ, ric1Δ::(pTDH3−>TRP2(S65R, S76L), pPGK1−>ARO4 (K229L)), |
| | X-3::(pTEF2−>TRP1, pCCW12−>TRP3), X-4::(pTDH3−>PcPsik, pCCW12−>PcPsiM), XI-1::(pTEF1−>PcCPR, |
| | PcPsiH<−pPGK1, KIUra3), X-2::(pPGK1−>PcCYB5), XVI-21::(pTDH3−>PcPsik, pCCW12−>PcPsiM), |
| | pdc5Δ, erg4Δ, dia3Δ, pho5Δ, pho3Δ |
| SC-416 | MATa his3Δ1 leu2Δ0 met15Δ0 ura3Δ0 XI-5::(pTDH3−>CrTdc, KiLeu2<−pKiLeu2, |
| | pTEF1−>ARO4(K229L), TRP2 (S65R, S76L)<−pTEF2, pFBA1−>ARO1, ARO2<−pPGK1), |
| | XII-1::(pTDH3−>CkPta, pTEF1−>BbXfpk, EcAroL<−pTEF2, BsPrs<−pPGK1), gpp1Δ::MET17, |
| | XII-2::(pTDH3−>TRP4, SpHis5), aro10Δ, ric1Δ::(pTDH3−>TRP2(S65R, S76L), pPGK1−>ARO4 (K229L)), |
| | X-3::(pTEF2−>TRP1, pCCW12−>TRP3), X-4::(pTDH3−>PanCyPsiK, pCCW12−>PanCyPsiM), |
| | XI-1::(pTEF1−>PanCyCPR, PanCyPsiH<−pPGK1), X-2::(pPGK1−>PanCyCYB5, KIUra3), XVI-21::(pTDH3−>PcPsik, |
| | pCCW12−>PcPsiM), pdc5Δ, erg4Δ, dia3Δ, pho5Δ, pho3Δ |
| SC-417 | MATa his3Δ1 leu2Δ0 met15Δ0 ura3Δ0 XI-5::(pTDH3−>CrTdc, KiLeu2<−pKiLeu2, |
| | pTEF1−>ARO4(K229L), TRP2 (S65R, S76L)<−pTEF2, pFBA1−>ARO1, ARO2<−pPGK1), |
| | XII-1::(pTDH3−>CkPta, pTEF1−>BbXfpk, EcAroL<−pTEF2, BsPrs<−pPGK1), gpp1Δ::MET17, |
| | XII-2::(pTDH3−>TRP4, SpHis5), aro10Δ, ric1Δ::(pTDH3−>TRP2(S65R, S76L), pPGK1−>ARO4 (K229L)), |
| | X-3::(pTEF2−>TRP1, pCCW12−>TRP3), X-4::(pTDH3−>PcPsik, pCCW12−>PcPsiM(H210A)), |
| | XI-1::(pTEF1−>PcCPR, PcPsiH<−pPGK1, KIUra3) |

### Example 3—Construction of E. coli Strains for Production of Substituted Tryptamine Derivatives by Feeding Substituted Indole Acceptors

### Part 1

[0525] E. coli strains expressing genes to convert exogenously fed substituted indole acceptors into substituted tryptamine derivatives were constructed as follows. Genes to convert the substituted indole to the substituted tryptophan, and the substituted tryptophan to the substituted tryptamine were synthesized by Twist and cloned into the pRSFDuet-1 expression plasmid. Transformants were selected by plating on media containing kanamycin. Genes to convert the substituted tryptamine further into substituted tryptamine derivatives were synthesized by Twist and cloned into a custom-made plasmid vector (pRSGLY, synthesized by GeneArt) using standard restriction ligation using SpeI/XhoI restriction sites. This custom-made vector contained a LacI operon, AmpR cassette, replication origin and a multiple cloning site flanked by the T7 promoter and terminator. Additionally, the 5′ end also contained a ribozyme binding site (RBS) and a 6×His tag for subsequent protein purification. Fully assembled plasmids were transformed into E. coli DH5a strains or E. coli XJb (DE3) autolysis strains (Zymo Research). Plasmids to convert substituted indoles into substituted tryptamines, and plasmids to convert substituted tryptamines into substituted tryptamine derivatives are shown in Table 7 and Table 8. In some cases, genes to convert substituted tryptamines into substituted tryptamine derivatives were expressed on their own to facilitate substituted tryptamine feeding experiments as well as to facilitate in vitro biocatalytic experiments where the E. coli strains were used to produce and purify enzymes for in vitro reactions.

TABLE 7
Expression plasmids to construct substituted tryptamine
derivative production strains in E. coli

| | |
|---|---|
| Plasmid name | SEQ ID NO |

(Substituted) indole to (substituted) tryptophan

| | |
|---|---|
| PL-541(TmTrpB (M145T, N167D)) | SEQ ID NO: 67 |
| PL-542(PfTrpB(2B9)) | SEQ ID NO: 59 |
| PL-543(PcTrpB) | SEQ ID NO: 179 |
| PL-544(PcTrpB (M439T, N459D) | SEQ ID NO: 181 |

(Substituted) tryptophan to (substituted) tryptamine

| | |
|---|---|
| PL-545(PcncAAAD) | SEQ ID NO: 73 |
| PL-546(RgTdc) | SEQ ID NO: 69 |
| PL-547(PcPsiD) | SEQ ID NO: 71 |
| PL-548(PanCysPsiD) | SEQ ID NO: 77 |

(Substituted) indole to (substituted) tryptamine

| | |
|---|---|
| pRSFDuet-1 (PfTrpB(2B9)-CrTdc) | SEQ ID NO: 59, 25 |
| pRSFDuet-1 (PfTrpB(2B9)-RgTdc) | SEQ ID NO: 59, 69 |
| pRSFDuet-1 (PfTrpB(2B9)-PcPsiD) | SEQ ID NO: 59, 71 |
| pRSFDuet-1 (PfTrpB(2B9)-PcncAAAD) | SEQ ID NO: 59, 73 |
| pRSFDuet-1 (PfTrpB-CrTdc) | SEQ ID NO: 63, 25 |
| pRSFDuet-1 (PfTrpB-RgTdc) | SEQ ID NO: 63, 69 |
| pRSFDuet-1 (PfTrpB-PcPsiD) | SEQ ID NO: 63, 71 |
| pRSFDuet-1 (PfTrpB-PcncAAAD) | SEQ ID NO: 63, 73 |
| pRSFDuet-1 (SeTrpB-CrTdc) | SEQ ID NO: 61, 25 |
| pRSFDuet-1 (SeTrpB-RgTdc) | SEQ ID NO: 61, 69 |
| pRSFDuet-1 (SeTrpB-PcPsiD) | SEQ ID NO: 61, 71 |
| pRSFDuet-1 (SeTrpB-PcncAAAD) | SEQ ID NO: 61, 73 |
| pRSFDuet-1 (TRP5-CrTdc) | SEQ ID NO: 65, 25 |
| pRSFDuet-1 (TRP5-RgTdc) | SEQ ID NO: 65, 69 |
| pRSFDuet-1 (TRP5-PcPsiD) | SEQ ID NO: 65, 71 |
| pRSFDuet-1 (TRP5-PcncAAAD) | SEQ ID NO: 65, 73 |
| pRSFDuet-1 (TmTrpB (M145T, N167D)-CrTdc) | SEQ ID NO: 67, 25 |
| pRSFDuet-1 (TmTrpB (M145T, N167D)-RgTdc) | SEQ ID NO: 67, 69 |
| pRSFDuet-1 (TmTrpB (M145T, N167D)-PcPsiD) | SEQ ID NO: 67, 71 |
| pRSFDuet-1 (TmTrpB (M145T, N167D)-PcncAAAD) | SEQ ID NO: 67, 73 |
| pRSFDuet-1 (PcTrpB (M439T, N459D)-CrTdc) | SEQ ID NO: 181, 25 |
| pRSFDuet-1 (PcTrpB (M439T, N459D)-RgTdc) | SEQ ID NO: 181, 69 |
| pRSFDuet-1 (PcTrpB (M439T, N459D)-PcPsiD) | SEQ ID NO: 181, 71 |
| pRSFDuet-1 (PcTrpB (M439T, N459D)-PcncAAAD) | SEQ ID NO: 181, 73 |

(Substituted) tryptamine to (substituted) tryptamine derivative

| | |
|---|---|
| PL-214(Cs73Y_GA) | SEQ ID NO: 79 |
| PL-226(Pt73Y_GA) | SEQ ID NO: 81 |
| PL-182(Ha88B_2_GA) | SEQ ID NO: 83 |
| PL-520(AtCOMT1) | SEQ ID NO: 113 |
| PL-521(AtIGMT1) | SEQ ID NO: 115 |
| PL-522(HsASMT) | SEQ ID NO: 117 |
| PL-523(OpSTR) | SEQ ID NO: 143 |
| PL-524(RsSTR1 (V208A)) | SEQ ID NO: 145 |
| PL-525(CrSTR1) | SEQ ID NO: 147 |
| PL-526(CrSTR1 (D177A)) | SEQ ID NO: 149 |
| PL-527(MtMcbB) | SEQ ID NO: 151 |
| PL-528(MtMcbB (R72A, H87A)) | SEQ ID NO: 153 |
| PL-532(SsTxtE) | SEQ ID NO: 177 |

### Part 2

[0526] Alternatively, genes were synthesized by Twist and cloned as N-terminal HIS-tagged genes into the pET-28a(+) expression vector. Plasmids were cloned as described above. An additional list of plasmids constructed in Example 3 is given in Table 8.

TABLE 8
Additional list of expression plasmids to construct substituted
tryptamine derivative production strains in E. coli

| Plasmid name | SEQ ID NO |
|---|---|
| PL-946(PanCyTrpB) | SEQ ID NO: 255 |
| PL-947(PanCyPsiK) | SEQ ID NO: 159 |
| PL-948(PanCyPsiM) | SEQ ID NO: 127 |

### Example 4—Cultivation of Genetically Modified S. cerevisiae Strains for the De Novo Production of Tryptamine and Substituted Tryptamine Derivatives

### Part 1

[0527] Genetically engineered yeast strains were pre-cultured in 500 μL of liquid Delft minimal media with 20 g/L glucose and relevant amino acid supplements for 48 h at 30° C. and 280 rpm in 2 mL microtiter plates with air-permeable sealing. Subsequently, 10 μL of yeast preculture was transferred to 490 μL Delft minimal media with 20 g/L glucose and relevant amino acid supplements and cultivated for 72 h at 30° C. and 280 rpm. After cultivation, extracellular metabolites were extracted by mixing whole cell broth 1:1 with 100% methanol, vortexing thoroughly and centrifuging at 4000×g for 5 min. The supernatant was subsequently diluted in MiliQ water to obtain a final methanol concentration of 12.5% in the samples, which were then analyzed using UHPLC or LC-MS/MS as described in Example 8. Where possible, authentic analytical standards were used for quantification of tryptamine and tryptamine derivatives.

### Part 2

[0528] Alternatively, genetically engineered yeast strains were cultivated as described above but extracellular metabolites were extracted as follows: Samples were centrifugated at 4000×g for 5 min, then supernatant was mixed 1:1 with acetonitrile 100%. The extracted samples were diluted as needed so the extracted metabolite was within the calibration range of the analytical method.

### Example 5—Cultivation of Genetically Modified S. cerevisiae Strains for the Production of Substituted Tryptamine Derivatives by Feeding Substituted Indoles

[0529] Genetically engineered yeast strains were pre-cultured in 500 μL liquid Synthetic Complete media with relevant drop-out combinations containing 20 g/L glucose for 48 h at 30° C. and 280 rpm in 2 mL microtiter plates with air-permeable sealing. Subsequently, 10 μL of yeast pre-culture was transferred to 490 μL Synthetic Defined (SD) media with 20 g/L glucose and supplemented with relevant amino acids. In some cases cultivation and pre-cultivation was carried out as described in Example 4. Ethanol solutions of substituted indoles were added to the cultivation media yielding a final concentration of 1 mM substituted indole and 2% ethanol, and the strains were cultivated for 72 h at 30° C. and 280 rpm. During this initial cultivation engineered strains converted biosynthetically produced serine and endogenously supplied substituted indoles to substituted tryptophan derivatives which remain inside the engineered cells. Afterwards, the cultivation broths were centrifuged (3000×g 5 min) and the supernatants were discarded. The cell pellets were resuspended in 500 μL SD or Delft media supplemented with relevant amino acids and 20 g/L galactose to induce expression from GAL-promoters and the strains were cultivated for additionally 72 h at 30° C. and 280 rpm. During this secondary cultivation galactose induced expression of promiscuous tryptophan decarboxylases converted the substituted tryptophan into its corresponding substituted tryptamine which could then be freely exported from the cell. In some cultivations, S. cerevisiae strains additionally contained derivatizing enzymes which could further convert the produced substituted tryptamine into a substituted tryptamine derivative. After cultivation, whole cell broths were transferred to 2 mL screw cap tubes containing glass beads (Ø1 mm) and bead-bashed on a FastPrep® FP120 Cell Disrupter (Thermo Savant) at 6.5 m/s for 45 sec. The lysed yeast cells were spun down by centrifugation (4000×g 5 min) and supernatants were analyzed by UHPLC or LC-MS/MS as described in Example 8. In some cases, whole cell broth was centrifuged at 4000×g for 5 min and the supernatant was extracted and analyzed by UHPLC or LC-MS/MS. Where possible authentic analytical standards were used to confirm the identity of the produced molecules.

### Example 6—Cultivation of Genetically Modified E. coli Strains for the Production of Substituted Tryptamine Derivatives by Feeding Substituted Indole Acceptors

[0530] E. coli strains were pre-cultured in 500 μL of liquid LB media supplemented with kanamycin and/or ampicillin as required for 24 h at 37° C., 300 rpm in 2 mL microtiter plates with air-permeable sealing. Subsequently 50 μL of pre-culture was transferred to 450 μl of LB media with 20 g/L glucose, polypeptide expression inducer (3 mM arabinose+0.1 mM IPTG) and ethanol solutions of various substituted indole molecules (1 mM indole 2% ethanol) and cultured for 24 h at 37° C., 300 rpm. After cultivation, whole cell broths were transferred to 2 mL screw cap tubes containing glass beads (Ø1 mm) and bead-bashed on a FastPrep® FP120 Cell Disrupter (Thermo Savant) at 6.5 m/s for 45 sec. The lysed E. coli cells were spun down by centrifugation (4000×g 5 min) and supernatants were analyzed by UHPLC or LC-MS/MS as described in Example 8. In some cases, whole cell broth was centrifuged at 4000×g for 5 min and the supernatant was extracted and analyzed by UHPLC or LC-MS/MS. Where possible authentic analytical standards were used to confirm the identity of the produced molecules.

### Example 7—Assay Conditions for the Biocatalytic Production of Substituted Tryptamine Derivatives by Feeding Indole or Tryptamine Substrates in In Vitro Enzyme Assays

### Part 1

[0531] In some instances, production of substituted tryptamine derivatives can be carried in vitro using purified enzymes with addition of required co-factors and substrates. Preparation and running of the biocatalytic reactions were performed as follows:

[0532] 5 mL of 2× concentrated LB medium+Ampicillin (50 μg/mL) was inoculated with E. coli XJb (DE3) strains expressing a gene of interest and incubated overnight at 30° C. with shaking. The following day, cell cultures were transferred into 500 mL of 2× concentrated LB medium+Ampicillin (50 μg/mL) and incubated overnight at 30° C. with shaking. The following day, the cell cultures were transferred to 1 L of 2× concentrated LB medium+Ampicillin (50 μg/mL)+3 mM arabinose+0.1 mM IPTG. Cells were incubated for 24 h at 20° C. with shaking. The following day, the cells were collected by centrifugation at 6500×g for 10 mins at 4° C. Cells were resuspended in 20 mL ice-cold GT buffer (50 mM Tris-HCl pH7.4+1 mM phenylmethanesulfonyl fluoride+1 cOmplete™, mini, EDTA-free Protease Inhibitor Cocktail tablet (Roche)). The resuspended material was transferred to a 50 mL falcon tube and kept at −80° C. for at least 15 mins. Falcon tubes were then thawed at room temperature, as the tubes were thawing the following reagents were added; 2.6 mM MgCl₂, 1 mM CaCl₂, 250 μL of a 1.4 mg/ml DNase solution (Sigma) dissolved in MilliQ water. Tubes were gently inverted to mix then were incubated for 5 mins at 37° C. 4× Binding buffer (10 mL) was then added to the tubes (to final conc of 50 mM Tris-HCl pH7.4, 10 mM imidazole, 500 mM NaCl and the pH adjusted to 7.4 with HCl). The mix was centrifuged at 10000×g for 30 mins at 4° C., the supernatant transferred to a fresh 50 mL falcon tubes and centrifuged again to remove any remaining cellular debris at 10000×g for 30 minutes at 4° C. While the enzyme prep was centrifuging, 3 mL of HIS-Select (available from Sigma P6611) column material was added to a fresh 50 mL tube and washed by adding MilliQ water up to 50 mL, centrifuging at 2000×g for 2 mins and discarding the supernatant. This washing step was repeated. Finally, MilliQ water was added to the HIS-Select material to an approximate 50% volume. Collected supernatant from the centrifuged enzyme preparation was transferred to the tube containing the HIS-Select material through a Miracloth (available from Merck Millipore), and then incubated at 4° C. with gently shaking by inversion for 2 h. After 2 h the mix was centrifuged at 2000×g for 4 minutes at 4° C. and the supernatant discarded. The remaining HIS-Select material was washed twice with 1× binding buffer (50 mM Tris-HCl, 0.5M NaCl, 10 mM Imidazole, pH 7.4) with centrifugation at 2000×g for 4 minutes at 4° C. The HIS-Select material was resuspended in 5 mL 1× binding buffer and transferred to a Poly-Prep® Chromatography Column (available from BioRad, 7311550). The HIS-Select material was kept at 4° C. and washed twice with 1× binding buffer by filling up the column and allowing it to drip through. Finally, purified enzymes were eluted from the HIS-Select material by adding 7.5 mL of elution buffer (50 mM Tris-HCl, 500 mM Imidazole, pH7.4) and collecting the flow through. Enzymes were used immediately in in vitro enzyme assays or stored at −20° C. in 50% glycerol until needed.

[0533] In vitro conversion of various (substituted) indoles to (substituted) tryptophans and/or (substituted) tryptophans to (substituted) tryptamines and/or (substituted) tryptamines to (substituted) tryptamine derivatives was carried out according to Table 9. Substrates were dissolved in either water, methanol or DMSO depending on the substrate. Required co-factors were provided by a commercial supplier (e.g. Sigma).

TABLE 9
Assay set up for conversion of substituted indoles
to substituted tryptamine derivatives in vitro.

| Reagents | Volume (μL) |
|---|---|
| Purified enzymes | 5 |
| 25 mM substrate | 0.4 |
| 25 mM Co-factor/co-substrate | 0.4 |
| 1M Tris-HCl pH 7.8 | 2 |
| Milli-Q water | 12.2 |
| TOTAL | 20 |

[0534] The reaction mixture was scaled up or down as required. The reaction mixture was incubated without shaking at 30° C. for 24 hours. Samples were extracted by the addition of ice-cold 100% MeOH to a final concentration of 75% followed by centrifugation at 4000 rpm for 10 min. The supernatant was diluted to 12.5% with water prior to analysis as described in example 8. To confirm the identity of the produced substituted indoles LC-MS/QTOF was used as described in Example 8 to confirm the expected mass and fragmentation pattern of each detected molecule. Quantification of substituted indole production was done by comparing the peak area of the indole substrate and the substituted indole with authentic analytical standards (where available), where a substrate was unavailable, quantification was achieved by comparing with an authentic analytical standard of the indole substrate. % Conversion of substrates to substituted indoles by enzymatic biocatalysis was calculated by measuring the decrease in substrate and increase in product after 24 h incubation.

### Part 2

[0535] Alternatively, 5 mL of 2× concentrated LB medium+appropriate antibiotic (50 μg/mL) was inoculated with E. coli XJb (DE3) strains expressing a plasmid of interest and incubated overnight at 30° C. with shaking. The following day, 50 ml TB medium+antibiotic in 250 ml baffled flasks was inoculated with 0.5 mL overnight cell culture and incubated for 3.5 hrs at 30° C. The cell cultures were then induced with 3 mM arabinose, 0.1 mM IPTG and Incubated for 24 h at 25° C., with shaking. The following day, the cells were collected by centrifugation at 6500×g for 10 mins at 4° C. Cells were resuspended in 5 mL ice-cold protein extraction buffer (50 mM Tris-HCl pH7.4+1 mM phenylmethanesulfonyl fluoride+1 cOmplete™, mini, EDTA-free Protease Inhibitor Cocktail tablet (Roche). The resuspended material was transferred to five 1.5 mL 80ppendorf tubes and kept at −80° C. for at least 15 mins. The tubes were then thawed at room temperature, as the tubes were thawing the following reagents were added; 2.6 mM MgCl₂, 1 mM CaCl₂, 300 U/mL Dnase solution (DENARASE®, C-lecta) and 0.2 mg/mL lysozyme (Sigma) dissolved in MilliQ water. Tubes were gently inverted to mix then were incubated for 10-15 mins at 37° C. 3 volumes of 4× Binding buffer were then added to the tubes (to final concentration of 50 mM Tris-HCl pH7.4, 10 mM imidazole, 500 mM NaCl and the pH adjusted to 7.4 with HCl). The mix was centrifuged at 10000×g for 30 mins at 4° C., the supernatant transferred to a fresh 80ppendorf tubes and centrifuged again to remove any remaining cellular debris at 10000×g for 30 minutes at 4° C. While the enzyme prep was centrifuging, HisPur 0.2 ml spin column (Thermo Scientific) are prepared as instructed by manufacturer. HisPur column was washed with MilliQ water and equilibrated with two resin-bed volumes of 1×his-binding buffer two times. HisPur column was centrifuged at 700×g for 2 minutes to remove buffer. 600 μL of collected supernatant from the centrifuged enzyme preparation was transferred to the HisPur column and then incubated at 4° C. with gentle shaking by inversion for 30 minutes. After 30 minutes, the unbound protein was removed by centrifugation 700×g for 2 min. The remaining 600 μL of collected supernatant from the centrifuged enzyme preparation was loaded to the HisPur column and incubated again at 4° C. with shaking. Unspecific binding of other proteins was removed by washing twice with 1× binding buffer (50 mM Tris-HCl, 0.5M NaCl, 10 mM Imidazole, pH 7.4). Enzyme was resuspended in 200 μl elution buffer for 2 minutes before elution by centrifugation (700×g for 2 minutes at 4° C.). Enzymes were used immediately in in vitro enzyme assays or stored at −20° C. in 50% glycerol until needed.

TABLE 10
Assay set up for conversion of substituted indoles
to substituted tryptamine derivatives in vitro.

| Reagents | Volume (μL) |
|---|---|
| Purified enzymes | 5 |
| 50 mM substrate | 3 |
| 50 mM Co-factor/co-substrate | 3 |
| 1 mM Pyridoxal phosphate (PLP) | 0.05 |
| 1M Tris-HCl pH 8.0 | 2.5 |
| Milli-Q water | 36.45 |
| TOTAL | 50 |

### Example 8—Detection and Quantification Methods for Substituted Tryptamine Derivatives

### Part 1

[0536] LC-MS/QTOF was performed on a Dionex UltiMate 3000 Quaternary Rapid Separation UHPLC⁺ focused system (Thermo Fisher Scientific, Germering, Germany) coupled to a Compact micrOTOF-Q mass spectrometer (Bruker, Bremen, Germany) equipped with an electrospray ion source (ESI) operated in positive ion mode. Separation was achieved on a Kinetex XB-C18 column (150×2.1 mm, 1.7 μm, 100 Å, Phenomenex). For eluting 0.05% (v/v) formic acid in H₂O and 0.05% (v/v) formic acid in acetonitrile were employed as mobile phases A and B, respectively. Gradient conditions were as follows: 0.0-1.0 min 2% B; 1.0-24.0 min 2-75% B, 24.0-25.0 min 75-100% B, 25.0-27.5 min 100% B, 27.5-28.0 min 100-2% B, and 28.0-30.0 min 2% B. The flow rate of the mobile phase was 300 μL/min and the injection volume was 10 μL. The column oven temperature was maintained at 30° C. UV spectra for each sample were acquired at 220, 230, 240, and 280 nm. The ion spray voltage was maintained at +4500 V. Dry temperature was set to 250° C., and the dry gas flow was set to 8 L/min. Nitrogen was used as the dry gas, nebulizing gas, and collision gas. The nebulizing gas was set to 2.5 bar and collision energy to 10 eV. MS spectra were acquired in an m/z range from 50 to 1000 amu and MS/MS spectra in a range from 100-800 amu. Sampling rate was 2 Hz. Sodium formate clusters were used for mass calibration. All files were automatically calibrated by postprocessing. The data was processed using Bruker Compass DataAnalysis 4.3.

[0537] UHPLC analysis of tryptamine, serotonin, and other substituted tryptamine derivatives was performed on an Agilent 1290 Infinity II LC system (Agilent Technologies, Böblingen, Germany). Separation was achieved on a Kinetex XB-C18 column (100×2.1 mm, 1.7 μm, 100 Å, Phenomenex). Isocratic elution using 0.05% (v/v) formic acid in H₂O was employed using a flowrate of 0.60 ml/min and a run-time of 5 min. The column oven temperature was maintained at 35° C. and the injection volume was 5 μL. UV spectra for each sample were acquired at 220 nm. The data was processed using Agilent Openlab CDS Chemstation Rev. C.01.10.

### Part 2

[0538] Alternatively, UHPLC analysis of tryptamine, serotonin, and other substituted tryptamine derivatives was performed on an Agilent 1290 Infinity II LC system (Agilent Technologies, Böblingen, Germany). Separation was achieved on a Waters ACQUITY UPLC CSH Fluoro-Phenyl Column (100×2.1 mm, 1.7 μm, 130 Å) using gradient elution. For elution 10 mM ammonium acetate in H₂O at pH=7 and 10% water in 90% (v/v) methanol with 10 mM ammonium acetate were employed as mobile phases A and B, respectively. Gradient conditions were as follows: 0.0-5.0 min 5-95% B; 5.0-7.0 min 95% B, 7.0-7.1 min 95-5% B. The flow rate of the mobile phase was 0.400 ml/min and the injection volume was 2 μL. The column oven temperature was maintained at 35° C. UV spectra for each of the samples were acquired at 220 and 280 nm. The data was processed using Agilent Openlab CDS Chemstation Rev. C.01.10.

[0539] UHPLC analysis of baeocystin, norbaeocystin, psilocybin and other substituted tryptamine derivatives was performed on an Agilent 1290 Infinity II LC system (Agilent Technologies, Böblingen, Germany). Separation was achieved on a Waters ZORBAX RRHD HILIC Plus column (100×2.1 mm, 1.8 μm, 95 Å) using gradient elution. Mobile phase A consisted of 5% H₂O in 95% (v/v) acetonitrile with 10 mM Amonmium Acetate and 10 mM Formic acid, while mobile phase B consisted of 50% H₂O in 50% (v/v) acetonitrile with 10 mM Amonmium Acetate and 10 mM Formic acid. Gradient conditions were as follows: 0.0-6.0 min 5% B; 6.0-11.5 min 5-95% B, 11.5-12.0 min 95% B, 12.0-12.1 min 95-5% B, 12.1-12.2 min 5% B. The flow rate of the mobile phase was 0.400 ml/min and the injection volume was 1 μL. The column oven temperature was maintained at 40° C. UV spectra for each of the samples were acquired at 210 and 280 nm. The data was processed using Agilent Openlab CDS Chemstation Rev. C.01.10.

[0540] LC-MS analysis of psilocybin and related derivatives and metabolites was performed as follows. High resolution LC-MS measurements were carried out on a Dionex UltiMate 3000 UHPLC (Thermo Fisher Scientific, US), connected to an Orbitrap Fusion Mass Spectrometer (Thermo Fisher Scientific, US). The UHPLC was equipped with a SeQuant zic-Hilic column (Merck KgaA), 15 cm×2.1 mm, 3 μm. The temperature was 35° C. and the flow rate 0.5 mL/min. The system was running an isocratic gradient with a mobile phase consisting of 20% 10 mM ammonium formate (pH 3) and 80% acetonitrile, with 0.1% formic acid. The samples were passed on to the MS equipped with a heated electrospray ionization source (HESI) in positive-ion mode with sheath gas set to 50 (a.u.), aux gas to 10 (a.u.) and sweep gas to 1 (a.u.). The cone and probe temperature were 325° C. and 350° C., respectively, and spray voltage was 3500 V. Scan range was 100-800 Da and time between scans was 50 ms. In all cases, authentic analytical standards were used to the produced metabolites.

### Example 9—Test of Chemical Stability of Substituted Tryptamine Derivatives

[0541] Chemical stability of substituted tryptamine derivatives was determined under alkaline, acidic, oxidative and heat stress as follows. 25 mM stock solutions of the target tryptamine molecules were prepared in 100% methanol. 15 μL is mixed with 5 μL of 400 mM HCl solution (final pH=1.1), 400 mM NaOH solution (Final pH=12.5), 12% H₂O₂ solution (final concentration 3%), or H₂O pH 7.0. Acidic, alkaline and oxidative samples were incubated at 30° C. for 24 h while samples in water were incubated at 80° C. for 24 h. A control under ambient conditions was also prepared where 15 μL of the molecule was added to 5 μL H₂O pH 7.0 and incubated at 30° C. After 24 h samples were placed on ice and 60 μL of ice-cold 100% methanol is added to each sample. Samples were centrifuged and transferred to HPLC vials for analysis. The remaining concentration was quantified by comparing to authentic analytical standards. Determining the presence of degradation products were determined by comparing with authentic analytical standards.

### Example 10—In Vitro Production of Substituted Tryptamine Glycosides

[0542] For in vitro studies of glycosyl transferase performance in glycosylating substituted tryptamines, purified glycosyl transferases were prepared as described in Example 7 and in vitro enzyme assays run as described below in Table 11.

TABLE 11
Assay set up for producing substituted
tryptamine glycosides in vitro

| Reagent | Volume (μL) |
|---|---|
| Purified glycosyl transferase enzyme | 5 |
| 25 mM substituted tryptamine substrate | 0.4 |
| 1M Tris-HCl pH 7.4 | 2 |
| Milli-Q water | 11.9 |
| Alkaline phosphatase (1 U/μL) | 0.2 |
| 50 mM UDP-sugar | 0.5 |
| TOTAL | 20 |

[0543] The reaction mixture was scaled up or down as required. The reaction mixture was incubated without shaking at 30° C. for 24 hours. Extraction and analysis were performed as described (Examples 7 and 8) above for this example. To confirm the identity of the produced substituted tryptamine glycosides LC-MS/QTOF was used as described above (example 8) to confirm the expected mass and fragmentation pattern of each detected molecule. Quantification of substituted tryptamine glycoside production was done by comparing the peak area of the substituted tryptamine substrate and the substituted tryptamine glycoside with authentic analytical standards (where available), where a standard was unavailable, quantification was achieved by comparing with an authentic analytical standard of the substituted tryptamine aglycone. % Conversion of substituted tryptamine substrates to substituted tryptamine glycosides by specific Glycosyl transferases was calculated by measuring the decrease in substrate and increase in product after 24 h incubation. Quantification was also achieved using the UHPLC analytical methods described in Example 8.

### Example 11—High-Level De Novo Production of Tryptamine by Engineered S. cerevisiae Strains

### Part 1

[0544] S. cerevisiae strains producing high amounts of tryptamine were constructed as described above. Tryptamine producing strains are ideal “mother strains” for the introduction of derivatizing enzymes to produce a range of substituted tryptamine derivatives de novo. Cultivation, extraction, and analysis was carried out as described in Example 4 and 8 to quantify the amount of tryptamine produced by various engineered S. cerevisiae strains as shown in Table 12. It was found that overexpression of various heterologous and native S. cerevisiae genes resulted in high levels of tryptamine production.

TABLE 12
De novo tryptamine production titers by
engineered S. cerevisiae strains

| | Average tryptamine |
|---|---|
| Strain | titer (mg/L |
| BY4741 | ND |
| SC-17 | 85.2 |
| SC-18 | 31.5 |
| SC-25 | 149.3 |
| SC-43 | 123.7 |
| SC-44 | 202.7 |

### Part 2

[0545] In a follow up experiment, tryptamine production strains were further engineered to increase titer. Strains were constructed according to Example 1 and a list of strains constructed is shown in Table 5 and Table 6. Strains were cultivated according to Example 4 and quantified according to Example 8. The results, shown in Table 13 and FIG. 14 demonstrate further genetic modifications significantly increase tryptamine titer. The resulting highest production strains serves as an ideal starting point to further engineer S. cerevisiae to produce substituted tryptamine derivatives.

TABLE 13
Further de novo tryptamine production by engineered
S. cerevisiae strains in mg/L.

| | Average |
|---|---|
| Strain | titer (mg/L |
| BY4741 | ND |
| SC-49 | 252.96 |
| SC-56 | 332.45 |
| SC-58 | 247.59 |
| SC-59 | 362.97 |
| SC-60 | 204.64 |
| SC-62 | 511.01 |
| SC-106 | 448.62 |

ND: Not detected

### Conclusion

[0546] Through the genetic modifications including native gene overexpressions, gene deletions, and heterologous gene expressions in S. cerevisiae, production of the non-native metabolite tryptamine could be produced in significant amounts far beyond anything reported in the art.

### Example 12—De Novo Production of Substituted Tryptamine Derivative Serotonin by Engineered S. cerevisiae Strains

### Part 1

[0547] De novo production of serotonin in yeast was achieved by combining the gene encoding RgTdc to convert L-tryptophan to tryptamine with genes encoding enzymes (OsT5H and FoCPR) to convert tryptamine to serotonin. Integrative plasmids harboring these genes were introduced into S. cerevisiae strain BY4741 as described previously. The genetically engineered yeast strains were cultivated, and extracellular metabolites extracted as described in Example 4 and 8. Production of serotonin was quantified by comparison to authentic analytical serotonin standards by UHPLC analysis. Cultivation results are shown in Table 14. Overexpression of these genes successfully resulted in the production of serotonin.

TABLE 14
Production of serotonin by genetically
engineered S. cerevisiae strain.

| | Average |
|---|---|
| Strain | serotonin titer (mg/L |
| BY4741 | ND |
| SC-21 | 25.8 |

[0548] It was found that yeast could be engineered to produce serotonin by conversion of tryptophan to tryptamine (by a tryptophan decarboxylase) then direct hydroxylation at the 5-position on the indole ring by a tryptamine hydroxylase and a cytochrome P450 reductase. This is a significant advancement on methods known in the art (e.g. WO2013127915) which utilizes the tetrahydrobiopterin dependent tryptophan hydroxylase enzyme to convert tryptophan to 5-hydroxytryptophan, then decarboxylation to serotonin by 5-hydroxytryptophan decarboxylase. Tetrahydrobiopterin is not natively produced by most microorganisms including yeast requiring either supplementation with this expensive co-factor, or extensive engineering efforts to engineer the microorganism to produce the cofactor de novo. Direct conversion from tryptamine as demonstrated here is not only more efficient but alleviates the need to consider this additional cofactor requirement. Also surprising is the observation that a CYP/CPR pair from different organisms works efficiently in yeast. Typically, cytochrome P450's (CYP's) requires the action of a specific cytochrome P450 reductase (CPR) to function. Many plant species for example have multiple CPR enzymes which function only with specific CYP's from that species. Interestingly a CYP from Orzya Sativa (OsT5H) is functional with a CPR from Fusarium oxysporum (FoCPR).

### Part 2

[0549] In a follow up experiment, serotonin production was further improved by introducing OsT5H (SEQ ID NO: 95) and FoCPR (SEQ ID NO: 111) into a higher tryptamine producing strain (SC-106). Strains were constructed according to Example 1, cultivated according to Example 4 and quantified according to Example 8. The results, shown in Table 15 and FIG. 15 demonstrate further improvement in serotonin titer with SC-75 producing significantly higher amounts in serotonin, indicating that the OsT5H/FoCPR enzyme pair has significant biocatalytic capacity to convert tryptamine into serotonin. The results also demonstrate that expression of tryptamine 5-hydroxylase (OsT5H) alone is insufficient to enable efficient serotonin production, and that the concerted action of a CYP/CPR pair is needed for full catalytic activity. In a strain expressing OsT5H without FoCPR (SC259), only trace amounts of serotonin are detected demonstrating the importance of co-expression of an efficient CPR. While S. cerevisiae does contain a native CPR enzyme (Ncp1), it typically does not function with heterologous CYP enzymes such as tryptamine 5-hydroxylases. Indeed, the results shown in Table 15 show that in SC-259, a strain expressing OsT5H but no heterologous CPR (relying on the native yeast Ncp1) minimal production of serotonin is observed.

TABLE 15
Further production of serotonin by engineered S. cerevisiae strains
in mg/L, data presented as the average of triplicate experiments.

| Strain | Genotype description | Tryptamine | Serotonin |
|---|---|---|---|
| BY4741 | Wild-type | ND | ND |
| SC-106 | Improved tryptamine | 410.29 | ND |
| | producer | | |
| SC-259 | Serotonin producer | 296.98 | 10 |
| | without FoCPR | | |
| SC-75 | Serotonin producer | 7.88 | 641.29 |
| | with FoCPR | | |

ND: Not detected

### Conclusion

[0550] This experiment demonstrates that S. cerevisiae can be engineered to efficiently produce serotonin by an alternative biosynthetic pathway not known in the art. This production method offers significant improvement over prior art by being more efficient but also alleviating the need to produce tetrahydrobiopterin or add it exogenously. This experiment also demonstrates that functional expression a tryptamine 5-hydroxylase requires co-expression of a cytochrome p450 reductase such as FoCPR for full catalytic activity. Finally, this experiment demonstrates the surprising observation that FoCPR significantly enhances the activity of OsT5H even though its from a completely different organism.

### Example 13—De Novo Production of Substituted Tryptamine Derivative 4-Coumaroyl Serotonin by Engineered S. cerevisiae Strains

[0551] De novo production of the high-value molecule 4-coumaroyl serotonin, derived from Safflower was achieved by combining enzymes for the de novo production of tryptamine (RgTdc), enzymes to derivatize tryptamine to serotonin (OsT5H, FoCPR), enzymes for the de novo production of 4-Coumoryl CoA (ARO7(G141S), ARO8, Pal2, C4 h, Atr2, 4CI), and finally an enzyme to derivatize serotonin with 4-Coumoryl CoA to produce 4-Coumoryl serotonin (CaSHT). Integration plasmids encoding these genes were introduced into S. cerevisiae as described above.

[0552] Genetically engineered strains were cultivated as described above and production of 4-Coumoryl serotonin as well as other pathway intermediates were quantified by comparison to authentic analytical standards by HPLC analysis. Genotypes for each strain tested is shown in Table 5, while results from the cultivation experiment shown in Table 16 and FIG. 16. Overexpression of these genes successfully resulted in the production of 4-coumorylserotonin.

TABLE 16
Production of 4-Coumorylserotonin by genetically engineered
S. cerevisiae strains. Shown is average titer
from triplicate cultivations of each strain.

Average titer (mg/L

| | | Phloretic | Coumaric | |
|---|---|---|---|---|
| Strain | Serotonin | acid | acid | 4CS |
| ST-4CS1 | 168 | 412 | 26 | 88 |
| ST-4CS2 | 0 | 215 | 31 | 410 |

4CS: 4-Coumorylserotonin.

### Conclusion

[0553] The results of this cultivation experiment show that yeast can be engineered to efficiently produce complex serotonin derivatives like 4-coumaroylserotonin (4CS), a molecule which has application as a potent anti-oxidant, tyrosinase inhibitor, and anti-hyperpigmentation agent.

### Example 14—De Novo Production of Other Substituted Tryptamine Derivatives by Engineered S. cerevisiae Strains

[0554] By combining one or several derivatizing enzymes with strains which produce tryptamine, a range of substituted tryptamine derivatives can be produced. This was demonstrated by constructing strains which produced tryptamine (expressing RgTdc), then converting tryptamine to serotonin (by expressing OsT5H and FoCPR), then converting serotonin into more complex derivatives such as O-methyl serotonin by expressing HsASMT and N-methyl serotonin by expressing CsSNMT1. Strains were cultivated, extracted and analyzed by LC-MS/QTOF as described previously to confirm the production of the substituted tryptamine derivative by the engineered strains as shown in Table 17.

TABLE 17
S. cerevisiae strains, retention time, calculated theoretical
m/z, experimentally observed m/z and fragmentation pattern
of O-methyl serotonin and N-methylserotonin produced de novo
by engineered S. cerevisiae strains

| | | Reten- | Calcu- | | |
|---|---|---|---|---|---|
| | | tion | lated | Observed | Fragmen- |
| | | time, | m/z | m/z | tation |
| Strain | Product | min. | [M + H]⁺ | [M + H]+ | pattern |
| SC-34 | O-methyl | 1.8 | 191.1179 | 191.1173 | MS2(191.1173): |
| | serotonin | | | | m/z 174.0906 |
| | | | | | corresponding |
| | | | | | to loss of the |
| | | | | | amino-group |
| SC-36 | N-methyl | 1.8 | 191.1179 | 191.1167 | MS2(191.1167): |
| | serotonin | | | | m/z 160.0749 |
| | | | | | corresponding |
| | | | | | to loss of the |
| | | | | | methylamine- |
| | | | | | group |

### Conclusion

[0555] The results of this experiment show that yeast strains engineered to production serotonin can be further engineered to produce more complex serotonin derivatives. The results also surprisingly demonstrate that HsASMT, and enzyme described as converting normelatonin into melatonin, also has catalytic activity for serotonin and can convert it into O-methylserotonin. Finally, these results demonstrate that a putative methyltransferase from Citrus sinensis (CsSNMT1) is also active on serotonin.

### Example 15—Production of Substituted Tryptamine Derivatives by Feeding Substituted Indoles to Engineered S. cerevisiae Strains

[0556] Production of 5-flouro-tryptamine and 5-methoxy-tryptophan was achieved by feeding substituted indoles to genetically engineered S. cerevisiae strains constructed as described in Example 2. The strains harboured centromeric plasmids containing the genes encoding PfTrpB(2B9) for conversion of substituted indoles to substituted tryptophan and RgTdc for conversion of substituted tryptophan to the corresponding substituted tryptamine. RgTdc was placed under the control of a GAL10-promoter and expression was induced with galactose after an initial cultivation with glucose. The yeast strains were cultivated as described in Example 5 with supplementation of either 1 mM 5-fluoro-indole or 1 mM 5-methoxy-indole resulting in the production of 5-fluoro-tryptamine and 5-methoxy-tryptophan, respectively. Metabolites were extracted and analyzed by LC-MS/MS as previously described. Results of the LC-MS/MS analysis are provided in Table 18. While it was found that strains expressing a heterologous tryptophan synthase could successfully convert substituted indoles to substituted tryptophans, surprisingly, it was found that a wild-type S. cerevisiae strain (BY4741) could also catalyze this reaction successfully converting 5-methoxy-indole into 5-methoxy-tryptophan. This indicates that native S. cerevisiae enzyme Trp5 also has capacity to convert substituted indoles into their corresponding substituted tryptophans. It was also found that tryptophan decarboxylases could convert substituted tryptophans into their corresponding substituted tryptamines as shown by the conversion of 5-fluoro-indole to 5-fluoro-tryptamine by combining a heterologous tryptophan synthase with a tryptophan decarboxylase.

TABLE 18
S. cerevisiae strains, retention time, calculated theoretical m/z, experimentally
observed m/z and fragmentation pattern of 5-fluorotryptamine and 5-methoxytryptophan
produced by the in vivo conversion of 5-fluoroindole and 5-methoxyindole, respectively
by engineered S. cerevisiae strains.

| | | | Retention | Calculated | Observed | |
|---|---|---|---|---|---|---|
| | | | time, | m/z | m/z | Fragmentation |
| Strain | Substrate | Product | min. | [M + H]⁺ | [M + H]⁺ | pattern |
| SC-41 | 5-fluoro- | 5-fluoro- | 5.5 | 179.0979 | 179.0983 | MS2(179.0983): m/z |
| | indole | tryptamine | | | | 162.0697 |
| | | | | | | corresponding to |
| | | | | | | loss of the amino- |
| | | | | | | group |
| SC-41 | 5-methoxy- | 5-methoxy- | 5.7 | 235.1077 | 235.1081 | MS2(235.1081): m/z |
| | indole | tryptophan | | | | 218.0807 |
| | | | | | | corresponding to |
| | | | | | | loss of the amino- |
| | | | | | | group, m/z |
| | | | | | | 174.0911, |
| | | | | | | corresponding to the |
| | | | | | | loss of the amino- |
| | | | | | | group and |
| | | | | | | decarboxylation. |
| BY4741 | 5-methoxy- | 5-methoxy- | 5.7 | 235.1077 | 235.1074 | MS2(235.1074): m/z |
| | indole | tryptophan | | | | 218.0807 |
| | | | | | | corresponding to |
| | | | | | | loss of the amino- |
| | | | | | | group, m/z |
| | | | | | | 174.0911, |
| | | | | | | corresponding to the |
| | | | | | | loss of the amino- |
| | | | | | | group and |
| | | | | | | decarboxylation. |

### Conclusion

[0557] This experiment demonstrated that in the absence of de novo production of a substituted tryptamine derivative of interest, yeast can also produce these compounds by importing substituted indole precursors supplied in the cultivation media and using the broad substrate scope of heterologous tryptophan synthase and tryptophan decarboxylase, produce and export the corresponding substituted tryptophan and/or tryptamine derivative.

### Example 16—Production of Iboga Alkaloids by Bioconversion Using Genetically Engineered S. cerevisiae

[0558] Iboga alkaloids including ibogaine and noribogaine are a therapeutically relevant class of molecules currently being investigated as promising treatments for addiction. Sourcing these molecules is currently difficult due to the scarcity of the native species which produces these molecules, Tabernanthe iboga, as well as the relatively low abundance of the molecules in these hosts. As an alternative, genetically engineered yeast can be used to convert precursor molecules from more abundant sources to the final iboga alkaloid(s) of interest.

[0559] As an example, production of ibogaine and noribogaine was achieved by bioconversion of alkaloids found in the root bark of abundant Tabernaemontana 901ba. Extraction and decarboxylation was carried out according to (Krengel et al., 2019) to obtain a methanolic extract of alkaloids lacking the methoxy moiety.

[0560] 50 ml Falcon tubes containing 3 g of dried and powdered root bark from each species were added to 40 ml methanol and either macerated or sonicated for 60 min. During this period, the tubes were vortexed four times and finally centrifuged at 2400 rpm for 5 min. The supernatant was recovered by pipetting through degreased cotton and evaporated to dryness.

[0561] 450 mg of each extract were dissolved separately in 30 ml of methanol and potassium hydroxide mixture (MeOH/KOH mix was made by dissolving 9 g of KOH in 2 ml of water and diluted with methanol to a final volume of 60 ml) in 50 ml Pyrex tubes which were then submerged in a hot water bath and maintained at an internal temperature of 72-75° C. for 2 h. The saponified methanolic extracts were evaporated to dryness. The latter were suspended separately in 25 ml of 2 M aqueous hydrochloric acid and gravity filtered through Whatman grade 2 filter papers. The filtrates were heated to 95° C. in 50 ml Pyrex tubes submerged in a hot water bath. After 15 min, the solutions could cool at room temperature before raising the pH to 10 with ammonium hydroxide and gravity filtering. The resulting filtrates and dried precipitated material were extracted five times with dichloromethane, respectively, which after evaporation yielded the saponified and decarboxylated alkaloid extracts.

[0562] The demethoxycarbonylated alkaloid extract was dissolved in ethanol and fed to engineered S. cerevisiae strains containing enzymes from the ibogaine biosynthetic pathway (2% final ethanol concentration). Cells expressed either the Tabernanthe iboga Ibogamine-10-hydroxylase (PL-533(Rec 2-LEU: Til10H), SEQ ID NO. 99) and Cytochrome P450 reductase (PL-535(Rec 3x-XI-5: CrCPR1) or PL-536(Rec 3x-XI-5: CrCPR2), SEQ ID NO's. 107 or 109) alone or in combination with the Tabernanthe iboga Noribogaine 10-O-methyltransferase (PL-534(Rec 1-XI-5-LEU: TiN100MT), SEQ ID NO. 119). Cultures were incubated in 500 μL of Delft media with appropriate amino acids added and incubated at 30° c. for 72 h. Whole cell broth was centrifuged at 4000×g for 5 min and the supernatant was extracted and analyzed by UHPLC or LC-MS/MS. Where possible authentic analytical standards were used to confirm the identity of the produced molecules.

### Example 17—Construction of E. coli Strains for Production of Substituted Tryptamine Glycosides from Substituted Tryptamines

[0563] E. coli strains expressing genes to convert substituted tryptamines into substituted tryptamine glycosides were constructed as follows. Glycosyltransferase genes of were codon-optimized for E. coli, synthesized by Twist and cloned into a custom-made plasmid vector (pRSGLY, synthesized by GeneArt) using standard restriction ligation using SpeI/XhoI restriction sites. This custom-made vector contained a LacI operon, AmpR cassette, replication origin and a multiple cloning site flanked by the T7 promoter and terminator. Additionally, the 5′ end also contained a ribozyme binding site (RBS) and a 6×His tag for subsequent protein purification. Fully assembled plasmids were transformed into E. coli DH5a strains or E. coli XJb (DE3) autolysis strains (Zymo Research). Plasmids encoding substituted tryptamine glycosyltransferases are shown in Table 19. In some cases, glycosyltransferases were expressed on their own to facilitate substituted tryptamine feeding experiments as well as to facilitate in vitro biocatalytic experiments where the E. coli strains were used to produce and purify enzymes for in vitro reactions.

TABLE 19
Expression plasmids to construct substituted tryptamine
glycoside production strains in E. coli

| | Gene | SEQ |
|---|---|---|
| Plasmid name | expressed | ID NO |
| PL-226(Pt73Y_GA) | Pt73Y | 203 |
| PL-85(At73B5_GA) | At73B5 | 201 |
| PL-28(At72B1_GA) | At72B1 | 197 |
| PL-364(Ha72T_GA) | Ha72T | 189 |
| PL-342(Cp73B_GA) | Cp73B | 235 |
| PL-326(Ha72B_GA) | Ha72B | 187 |
| PL-214(Cs73Y_GA) | Cs73Y | 227 |
| PL-19(RsAS_GA) | RsAS | 195 |
| PL-5(At73C5_GA) | At73C5 | 217 |
| PL-69(CrUGT-2_GA) | CrUGT-2 | 221 |
| PL-376(Sp72T_GA) | Sp72T | 191 |
| PL-32(OsEUGT11_GA) | OsEUGT11 | 213 |
| PL-341(Ad72X_GA) | Ad72X | 209 |
| PL-332(Bv73P_GA) | Bv73P | 233 |
| PL-206(Tc74Z_GA) | Tc74Z | 215 |
| PL-347(Zj71A_GA) | Zj71A | 211 |
| PL-96(Eg85S_GA) | Eg85S | 223 |
| PL-280(Ha76H_2_GA) | Ha76H_2 | 231 |
| PL-106(Si85B_GA) | Si85B | 225 |
| PL-355(Ac73H_GA) | Ac73H | 237 |
| PL-283(Vv83A_GA) | Vv83A | 241 |
| PL-274(Ha74B_GA) | Ha74B | 229 |
| PL-41(At76E11_GA) | At76E11 | 219 |
| PL-154(Qs85H_GA) | Qs85H | 239 |
| PL-78(At71C1-Sr71E1_354_GA) | At71C1-Sr71E1_354 | 199 |
| PL-338(Pt72B_GA) | Pt72B | 245 |
| PL-89(At71C1_At71C2_353_GA) | At71C1_At71C2_353 | 243 |
| PL-4(At71C2_GA) | At71C2 | 193 |
| PL-304(Sp72Q_GA) | Sp72Q | 205 |
| PL-305(Si72V_GA) | Si72V | 207 |
| PL-811(Cc91D1_GA) | Cc91D1 | 247 |
| PL-812(Pg91B1_GA) | Pg91B1 | 249 |
| PL-813(Ha91_GA) | Ha91 | 251 |

### Example 18—In Vitro Testing of Glycosyltransferase Performance in Glucosylating Substituted Tryptamines

[0564] For in vitro studies of glycosyltransferase performance in attaching glucose moieties onto free hydroxy groups of various substituted tryptamines, purified glycosyltransferases were prepared as described in Example 7 with enzyme assays carried out as described in Example 10, quantification of glucoside production was carried out as described in Example 8. Alternatively, where quantification by analysing peak areas by HPLC was not feasible due to insufficient separation of the substituted tryptamine and its corresponding glucoside, identification was carried out by LC-MS/QTOF from which the relative peak areas of both glucoside and substrate were used for calculating the % conversion of substituted tryptamine into its corresponding glucoside.

[0565] In an initial screen, glucosylation was tested with the substituted tryptamines Serotonin, Psilocin, Bufotenine and Noribogaine using UDP-glucose as the sugar donor. Corresponding structure ID's (OBT-001 to OBT-004) was given for each substituted tryptamine glucoside produced in this screen, structures of each molecule and common names are shown in FIG. 4. FIG. 4. Structures of substituted tryptamine glucosides validated by LC-MS/QTOF

### Substituted Tryptamine Glucosides Produced Using Psilocin as an Acceptor.

[0566] Numerous glycosyltransferases were found to catalyze the conversion of psilocin to OBT-001 (psilocin-O-β-D-glucoside) (FIG. 4). FIG. 5 shows a representative chromatogram produced by LC-MS/QTOF analysis of a reaction mixture containing the substituted tryptamine and an exemplary glycosyltransferase At71C2 (SEQ ID NO's. 193, 194). The figure further shows the retention time (RT), expected and measured mass of each compound and fragmentation pattern as determined by LC-MS/QTOF analysis thereby confirming the structure of the produced glucoside.

[0567] It was further found that multiple glycosyltransferases could catalyze the conversion of psilocin to OBT-001 (psilocin-O-β-D-glucoside) with varying conversion efficiencies. Table 20 shows glycosyltransferases which produced psilocin-O-β-D-glucoside along with the % conversion efficiency.

TABLE 20
Glycosyltransferases catalyzing the conversion
of psilocin to OBT-001 (psilocin-O-β-D-glucoside)
with calculated conversion efficiency.

| Enzyme name | % Conversion |
|---|---|
| At71C2 | 32.82 |
| At71C1-Sr71E1_354 | 28.05 |
| Sp72T | 22.57 |
| Pt73Y | 21.40 |
| At72B1 | 18.67 |
| RsAS | 17.27 |
| Ha72B | 16.21 |
| Ha72T | 16.18 |
| At73B5 | 1.00 |
| Sp72Q | 1.00 |
| Si72V | 1.00 |
| Ad72X | 1.00 |
| Zj71A | 1.00 |

### Substituted Tryptamine Glucosides Produced Using Noribogaine as an Acceptor.

[0568] Numerous glycosyltransferases were found to catalyze the conversion of noribogaine to OBT-002 (noribogaine-O-β-D-glucoside) (FIG. 4). FIG. 6 shows a representative chromatogram produced by LC-MS/QTOF analysis of a reaction mixture containing the substituted tryptamine and an exemplary glycosyltransferase. The figure further shows the retention time (RT), expected and measured mass of each compound and fragmentation pattern as determined by LC-MS/QTOF analysis thereby confirming the structure of the produced glucoside.

[0569] It was further found that multiple glycosyltransferases could catalyze the conversion of noribogaine to OBT-002 (noribogaine-O-β-D-glucoside) with varying conversion efficiencies. Table 21 shows glycosyltransferases which produced noribogaine-O-β-D-glucoside along with the % conversion efficiency.

TABLE 21
Glycosyltransferases catalyzing the conversion
of noribogaine to OBT-002 (noribogaine-O-β-
D-glucoside) with calculated conversion efficiency.

| Enzyme name | % Conversion |
|---|---|
| Pt73Y | 108.53 |
| At73B5 | 64.28 |
| At72B1 | 62.58 |
| Ha72T | 59.37 |
| Cp73B | 31.45 |
| Ha72B | 27.61 |
| Cs73Y | 26.54 |
| RsAS | 8.97 |
| At73C5 | 7.42 |
| CrUGT-2 | 7.41 |
| Sp72T | 4.08 |
| OsEUGT11 | 2.64 |
| Ad72X | 2.07 |
| Bv73P | 2.00 |
| Tc74Z | 1.63 |
| Zj71A | 1.53 |
| Eg85S | 1.50 |
| Ha76H_2 | 1.35 |
| Si85B | 1.32 |
| Ac73H | 1.29 |
| Vv83A | 1.24 |
| Ha74B | 1.03 |
| At76E11 | 0.98 |
| Qs85H | 0.83 |

### Substituted Tryptamine Glucosides Produced Using Bufotenine as an Acceptor.

[0570] Numerous glycosyltransferases were found to catalyze the conversion of bufotenine to OBT-003 (bufotenine-O-β-D-glucoside) (FIG. 4). FIG. 7 shows a representative chromatogram produced by LC-MS/QTOF analysis of a reaction mixture containing the substituted tryptamine and an exemplary glycosyltransferase. The figure further shows the retention time (RT), expected and measured mass of each compound and fragmentation pattern as determined by LC-MS/QTOF analysis thereby confirming the structure of the produced glucoside.

[0571] It was further found that multiple glycosyltransferases could catalyze the conversion of bufotenine to OBT-003 (bufotenine-O-β-D-glucoside) with varying conversion efficiencies. Table 22 shows glycosyltransferases which produced bufotenine-O-β-D-glucoside along with the % conversion efficiency.

TABLE 22
Glycosyltransferases catalyzing the conversion of
bufotenine to OBT-003 (bufotenine-O-β-D-glucoside)
with calculated conversion efficiency.

| Enzyme name | % Conversion |
|---|---|
| At71C1_At71C2_353 | 94.18 |
| At73C5 | 5.68 |
| Tc74Z | 0.62 |
| At71C1-Sr71E1_354 | 18.44 |
| Pt73Y | 17.87 |
| At73B5 | 49.06 |

### Substituted Tryptamine Glucosides Produced Using Serotonin as an Acceptor.

[0572] Numerous glycosyltransferases were found to catalyze the conversion of serotonin to OBT-004 (serotonin-O-β-D-glucoside) (FIG. 4). FIG. 8 shows a representative chromatogram produced by LC-MS/QTOF analysis of a reaction mixture containing the substituted tryptamine and an exemplary glycosyltransferase. The figure further shows the retention time (RT), expected and measured mass of each compound and fragmentation pattern as determined by LC-MS/QTOF analysis thereby confirming the structure of the produced glucoside.

[0573] It was further found that multiple glycosyltransferases could catalyze the conversion of serotonin to OBT-004 (serotonin-O-β-D-glucoside) with varying conversion efficiencies. Table 23 shows glycosyltransferases which produced serotonin-O-β-D-glucoside along with the % conversion efficiency.

TABLE 23
Glycosyltransferases catalyzing the conversion of
serotonin to OBT-004 (serotonin →
serotonin-O-β-D-glucoside) with calculated
conversion efficiency.

| Enzyme name | % Conversion |
|---|---|
| At71C1-Sr71E1_354 | 24.91 |
| Pt72B | 11.65 |
| At71C1_At71C2_353 | 11.63 |
| RsAS | 11.31 |

[0574] Overall, it was discovered that a range of glycosyltransferases could use various substituted tryptamines as sugar acceptors resulting in the production of a range of new substituted tryptamine glycosides. In the screen, enzymes were found which could catalyze a wide variety of different and highly specific reactions. Glycosyltransferases were found that could selectively attach a single glucose group onto the substituted tryptamine molecule producing a corresponding mono-glycosides, e.g. psilocin-O-β-D-glucoside (OBT-001) produced by Sp72T (SEQ ID NO's. 191, 192). Based on the calculated conversion % it was found many glycosyltransferases were highly active and could utilize UDP-glucose and efficiently glucosylate substituted tryptamines with high conversion efficiency. At71C1-Sr71E1_354 (SEQ ID NO's. 199, 200) for example was found to efficiently produce glucosides of psilocin, bufotenine, and serotonin, while the Pt73Y (SEQ ID NO's. 203, 204) was found to efficiently produce noribogaine glucoside. It was found that a large number of enzymes were found to catalyze glucosylation reactions on substituted tryptamines, in total this in vitro screen identified 30 glycosyltransferases active on substituted tryptamine molecules.

### Conclusion

[0575] The results of this experiment show that UGT enzymes from a diverse range of plant species surprisingly catalyze the glycosylation of substrates not encountered in their host species native environment, leading to the production of novel tryptamine glycosides. The experiment also revealed the surprisingly high catalytic activity of some of the tested UGT's with enzymes like At71C2, At71C1_At71C2_353, and Pt73Y converting a significant amount of available substrate into its corresponding glycoside

### Example 19—In Vitro Testing of Glycosyltransferase Performance in Glycosylating Substituted Tryptamines with Alternative UDP-Sugars

[0576] In Example 18, a range of glycosyltransferases were found which could accept UDP-glucose and catalyse production of a range of substituted tryptamine-glucosides. Top performing enzymes from this screen were further tested to determine whether they could accept alternative UDP-sugars, catalysing the production of substituted tryptamine-glycosides with different sugar groups attached. For in vitro studies of glycosyltransferase performance in glycosylating substituted tryptamines, purified glycosyltransferases were prepared as described in Example 7 with enzyme assays carried out as described in Example 10, quantification of glycoside production was carried out as described in Example 8. Alternatively, where quantification by analysing peak areas by HPLC was not feasible due to insufficient separation of the substituted tryptamine and its corresponding glycoside, quantification was carried out using LC-MS/QTOF data as described in example 18.

[0577] In an initial screen, glycosylation was tested using UDP-xylose as a sugar donor. Xylosylation of noribogaine and bufotenine was tested with Pt73Y (SEQ ID NO's. 203, 204), and xylosylation of psilocin was tested with At71C2 (SEQ ID NO's. 193, 194). A corresponding structure ID was given for each substituted tryptamine glycoside produced in this screen, structures of each molecule is shown in FIG. 9. The resulting LC-MS/QTOF chromatograms produced from each reaction are given in FIG. 10 for OBT-005, FIG. 11 for OBT-006 and FIG. 12 for OBT-007.

[0578] It was found that each tested enzyme could efficiently xylosylate their respective substrate producing the resulting xyloside. A calculation of the conversion % revealed that Pt73Y (SEQ ID NO's. 203, 204) converted 15% of available noribogaine and 7.9% of available bufotenine to their respective xylosides, while At71C2 (SEQ ID NO's. 193, 194) converted 8.2% of available psilocin to its respective xyloside. These results show that the discovered glycosyltransferase enzymes are capable of attaching not only glucose but other sugars as well, leading to a more diverse range of substituted tryptamine glycosides.

### Conclusion

[0579] The results of this experiment show that not only do these UGT's have wide substrate scope in terms of the aglycone substrate, but they also have a wide substrate scope for the UDP-sugar used. Not only could these UGT's accept UDP-glucose as a substrate but they can also accept other sugars like UDP-xylose as well.

### Example 21—Improved Psilocybin Production in Engineered S. cerevisiae Strains by Deletion of Native Phosphatase Genes

[0580] S. cerevisiae strains engineered to produce psilocybin by integration of heterologous psilocybin biosynthetic pathway genes is was observed that significant concentrations of psilocin was accumulated (e.g. Table 34). It was hypothesized that this accumulation was caused by cleavage of the phosphate group. It was further decided to test if the degradation of psilocybin to psilocin was caused by enzymatic hydrolysis by endogenous S. cerevisiae phosphatase enzymes. Psilocybin phosphatase from Psilocybe cubensis (PcPsiP) was found to share significant sequence homology with several native S. cerevisiae phosphatases. In P. cubensis, PcPsiP's native function was found to convert psilocybin to psilocin so it was further found that that the native S. cerevisiae enzymes shared significant sequence homology and that they could also have promiscuous activity towards psilocybin, similarly converting it to psilocin. To test this hypothesis several S. cerevisiae phosphatase genes were knocked out in psilocybin production strain SC-276 (according to Example 1), and the effect on the amount of psilocybin and psilocin produced measured from a standard cultivation (according to Example 4) and quantified using a standard HPLC analytical method with comparison to authentic analytical standards (according to Example 8). The results shown in Table 24 and FIG. 17 show significant improvements in psilocybin titer in several knockout strains. In general, knockout of these phosphatase genes results in significantly higher psilocybin production. In particular, DIA3, PHO5 and PHO3 knockout resulted in the biggest increase in psilocybin.

TABLE 24
Production of psilocybin and psilocin in engineered S. cerevisiae strains
with native phosphatase knockouts. Data shown in mg/L is
from triplicate experiments. ND: Not detected.

| Strain | Genotype description | SEQ ID NO: | Psilocybin | Psilocin |
|---|---|---|---|---|
| BY4741 | Wild-type | NA | ND | ND |
| SC-276 | Parental strain | NA | 177 | 72 |
| SC-302 | DIA3 | SEQ ID NO: 40 | 338 | ND |
| SC-303 | PHO5 | SEQ ID NO: 41 | 329 | ND |
| SC-412 | PHO12 | SEQ ID NO: 42 | 203 | 45 |
| SC-413 | PHO11 | SEQ ID NO: 43 | 213 | 32 |
| SC-301 | PHO3 | SEQ ID NO: 44 | 305 | ND |

### Conclusion

[0581] The results of this experiment demonstrated that the high psilocybin degradation observed in engineered yeast strains was caused by dephosphorylation by native S. cerevisiae phosphatase enzymes with homology to PsiP from P. cubensis. Deletion of these phosphatase genes resulted in significant improvement in psilocybin production through a significant reduction in psilocybin degradation to psilocin. This further demonstrated that deletion of one or more of these genes was a successful strategy to improve production.

### Example 22—In Vitro Production of Substituted Tryptamine Derivatives by One-Pot Biocatalytic Enzyme Cascade Using Serine and Substituted Indole Derivatives

### Part 1

[0582] In Example 15 production of substituted tryptamine derivatives 5-fluorotryptamine and 5-methoxytryptophan was achieved by S. cerevisiae strains overexpressing the engineered Tryptophan synthase PfTrpB(2B9) (and tryptophan decarboxylase RgTdc in the case of 5-fluorotryptamine) and feeding the respective substituted indoles (5-fluoroindole, 5-methoxyindole) in a cultivation experiment. In this experiment, a wild-type, non-engineered tryptophan synthase enzyme from Psilocybe cubensis (PcTrpB, SEQ ID NO: 179) was compared with engineered tryptophan synthases known in the art (PfTrpB(2B9), SEQ ID NO: 59 and TmTrpB(M145T,N167D), SEQ ID NO: 67). A PcTrpB enzyme containing comparable mutations to TmTrpB(M145T,N167D), was also generated to use as a comparison (PcTrpB(M439T,N459D), SEQ ID NO: 181). Genes were cloned into pET28a(+) expression plasmids and cloned into E. coli according to Example 3. Purified enzyme was prepared according to Example 7. In its native reaction, Tryptophan synthase converts indole and serine into tryptophan, in this assay we investigated whether different Tryptophan synthases could accept different substituted indoles and serine as substrate to produce the corresponding substituted tryptophan. In vitro enzyme reactions were set up according to Table 25, and incubated for X16 h at X30° c.

TABLE 25
Reaction components to test Tryptophan synthase
ability to accept substituted indole derivatives.

| Reagents | Volume (μL) |
|---|---|
| Purified enzyme | 5 |
| 50 mM substrate | 3 |
| 50 mM L-serine | 3 |
| 1 mM PLP | 0.05 |
| 1M Tris-HCl pH 8.0 | 2.5 |
| Milli-Q water | 36.45 |
| TOTAL | 50 |

[0583] After 16 h, the reaction was terminated by freezing. Samples were analyzed by HPLC according to Example 8. The amount of substituted indole converted to its corresponding substituted tryptophan (in percentage) was calculated by peak area, the results of the assay are presented in Table 26.

TABLE 26
% conversion of substituted indole and serine to its corresponding substituted tryptophan
derivative by engineered and wild-type tryptophan synthase enzymes. ND: Not detected.

| | Enzyme added | | | |
|---|---|---|---|---|
| | TmTrpB | | | PcTrpB |
| Substrate | (M145T, N167D) | PfTrpB (2B9) | PcTrpB | (M439T, N459D) |
| Indole | 30% | 20% | 100% | 100% |
| 4-hydroxyindole | ND | ND | 10% | 1% |
| 6-Hydroxyindole | 1% | 1% | 1% | 1% |
| 5-Methoxyindole | 5% | 1% | 80% | 60% |
| 4-Bromoindole | 2% | 1% | 1% | 1% |
| 5-Bromoindole | 5% | 5% | 80% | 80% |
| 6-Bromoindole | 2% | 2% | 25% | 40% |
| 7-bromoindole | 90% | 80% | 100% | 100% |
| 4-Chloroindole | 2% | 1% | 1% | 5% |
| 5-Chloroindole | 60% | 30% | 100% | 100% |
| 6-Chloroindole | 30% | 30% | 50% | 50% |
| 5,6-Dichloroindole | 1% | 1% | 2% | 2% |
| 4-Fluoroindole | 60% | 50% | 100% | 100% |
| 5-Fluoroindole | 60% | 10% | 100% | 100% |
| 6-Fluoroindole | 70% | 10% | 100% | 100% |
| 4-Nitroindole | ND | ND | ND | ND |
| 5-Nitroindole | ND | ND | 20% | 5% |
| 6-Nitroindole | ND | ND | ND | ND |
| 7-Nitroindole | ND | ND | 2% | ND |
| Azaindole | ND | ND | ND | ND |

[0584] The results showed that the tryptophan synthase enzymes tested could accept a wide range of substituted indole derivatives to produce the corresponding substituted tryptophan derivative. While as expected, the engineered tryptophan synthase enzymes, with amino acid modifications known in the art to substantially increase the substrate scope of these enzymes had significant activity with a broad panel of substituted indole derivatives, surprisingly, the wild-type tryptophan synthase from Psilocybe cubensis (PcTrpB), had comparable and in many cases superior activity than its engineered counterparts. PcTrpB and the engineered version PcTrpB (M439T, N459D) outperformed both TmTrpB (M145T, N167D) and PfTrpB (2B9), well known in the art to possess superior catalytic activity to wild-type tryptophan synthases with practically every substituted indole tested, while the wild-type PcTrpB outperformed even its engineered counterpart PcTrpB (M439T, N459D) with many substrates including 4-hydroxyindole, 5-methoxyindole, 5-nitroindole and 7-nitroindole. While no activity was detected using Azaindole as a substrate, this was likely due to the low solubility of the substrate. The results clearly show the surprisingly wide substrate scope of the wild-type tryptophan synthase (PcTrpB). While prior art describes extensive engineering and enzyme evolution efforts to increase the substrate scope and catalytic activity of tryptophan synthase enzymes, this study demonstrates that the non-engineered enzyme from Psilocybe cubensis significantly outperforms these engineered enzymes, opening the door for its use as a superior enzyme catalyst for the production of a diverse range of substituted tryptophan derivatives.

### Part 2

[0585] To further demonstrate the utility of fungal enzymes, a coupled reaction was set up using the wild-type Tryptophan synthase (PcTrpB), and a panel of Tryptophan decarboxylases. While tryptophan is the native substrate of tryptophan decarboxylases, which catalyse formation of the corresponding amine (tryptamine), prior art describes enzymes displaying a broader substrate scope and the ability to produce a range of substituted tryptamines from the corresponding substituted tryptophan derivative. RgTdc (SEQ ID NO: 69) in particular is known in the art to be particularly effective when combined with engineered Tryptophan synthases (TmTrpB (M145T, N167D) and PfTrpB (2B9)) in a one-pot reaction producing a substituted tryptamine derivative from the corresponding substituted indole derivative and serine. RgTdc was used as a benchmark to compare the activity and substrate scope of 2 fungal tryptophan decarboxylases from Psilocybe cubensis (PcPsiD, SEQ ID NO: 71) and related psilocybin producing fungus Panaeolus cyanescens (PanCyPsiD, SEQ ID NO: 77), as well as a non-canonical amino acid decarboxylase from P. cubensis (PcncAAD, SEQ ID NO: 73). In this assay, the ability of different tryptophan decarboxylases to convert a substituted tryptophan derivative, produced by conversion of a substituted indole and serine by PcTrpB was investigated. Purified enzymes were prepared according to Example 7, enzyme assays were set up according to Table 27 below and incubated at 30° cX for X16 h.

TABLE 27
Reaction components to test ability of tryptophan
decarboxylases to convert substituted tryptophan derivatives
produced by PcTrpB into substituted tryptamine derivatives

| Reagents | Volume (μL) |
|---|---|
| Purified enzymes | 10 |
| 50 mM substrate | 3 |
| 50 mM L-serine | 3 |
| 1 mM PLP | 0.05 |
| 1M Tris-HCl pH 8.0 | 2.5 |
| Milli-Q water | 31.45 |
| TOTAL | 50 |

[0586] After X16 h, the reaction was terminated by freezing. Samples were analyzed by HPLC according to Example 8. The amount of substituted indole converted to its corresponding substituted tryptamine (in percentage) was calculated by peak area, the results of the assay are presented in Table 28

TABLE 28
% conversion of substituted indole and serine to its corresponding substituted tryptamine
derivative by PcTrpB and different tryptophan decarboxylases. ND: Not detected.

| | Enzymes added: PcTrpB+ | | | |
|---|---|---|---|---|
| Substrate | PcncAAD | RgTdc | PcPsiD | PanCyPsiD |
| Indole | 1% | 100% | 100% | 75% |
| 4-Hydroxyindole | ND | 80% | 95% | 100% |
| 5-Methoxyindole | ND | 30% | 60% | 40% |
| 5-Bromoindole | ND | 100% | 100% | 20% |
| 6-Bromoindole | ND | 70% | 2% | 10% |
| 7-Bromoindole | 1% | ND | 75% | 75% |
| 5-Chloroindole | ND | 100% | 100% | 90% |
| 6-Chloroindole | ND | 20% | 25% | 40% |
| 4-Fluoroindole | 1% | 100% | 100% | 90% |
| 5-Fluoroindole | 1% | 100% | 100% | 100% |
| 6-Fluoroindole | 1% | 100% | 100% | 100% |

[0587] The results showed that while PcncAAD had negligible activity towards the substituted tryptophan derivatives produced by PcTrpB (presumably because indole molecules in general are probably outside of its substrate scope), the other 3 tryptophan decarboxylases had considerable activity. While unsurprisingly RgTdc, known in the art to possess significant substrate scope towards a range of substituted tryptophan derivatives, had good activity with most substrates tested, the 2 fungal tryptophan decarboxylases outperformed or equalled RgTdc with almost every substrate tested, with only 6-Bromoindole having higher activity with RgTdc. Interestingly, while RgTdc had no detectible activity towards 7-Bromoindole, both fungal enzymes were able to efficiently convert it to 7-Bromotryptamine with 75% conversion. Again, the results clearly show the wide substrate scope of wild-type enzymes from Psilocybe cubensis and Panaeolus cyanescens and their potential to efficiently produce a wide range of substituted tryptamine derivatives.

[0588] Combining these fungal tryptophan synthases and tryptophan decarboxylases enables the efficient one-pot production of a diverse range of substituted tryptamines from their corresponding substituted indoles and serine. From an industrial context this is important since substituted tryptamines are typically difficult to produce and often very expensive, in contrast substituted indoles are relatively easy to produce and often highly inexpensive.

### Conclusion

[0589] The results of this experiment showed that the wild-type tryptophan synthase from P. cubensis had a significantly broad substrate scope and could accept a diverse range of substituted indoles to produce the corresponding substituted tryptophan. This surprising observation overcomes prejudices in the art (e.g. US20160298152A1) claiming that native tryptophan synthase enzymes do not have wide substrate scope unless engineered with “activating mutations” corresponding to residue 144 and 166, or residue 292. These results showed that while indeed some tryptophan synthase enzymes such as TmTrpB and PfTrpB required these activation mutations to broaden their substrate scope, not all tryptophan synthases require them, and in fact the wild-type tryptophan synthase described herein from P. cubensis was more efficient and has broader substrate scope than the engineered enzymes described in the art. Furthermore, these results also showed that introducing the corresponding activating mutations into the wild-type Tryptophan synthase PcTrpB did not improve catalytic activity and substrate scope and in fact in some cases resulted in lower activity. Finally, these results showed that tryptophan decarboxylases from P. cubensis and P. cyanescens (PcPsiD and PanCyPsiD) also had surprisingly broad substrate scope and could at least match or in some cases outperform promiscuous tryptophan decarboxyles known in the art (RgTdc). Overall this indicates that psilocybin producing mushroom species are an underutilized source of valuable enzymes with exciting new bioindustrial applications offering advantages over methods known in the art.

### Example 23—Combining Additional Derivatizing Enzymes to a Tryptophan Synthase/Tryptophan Decarboxylase One-Pot Biocatalytic Enzyme Cascade Using Serine and Substituted Indole Derivatives Leads to More Complex Substituted Tryptamine Derivatives

[0590] In example 22 a biocatalytic cascade to produce diverse substituted tryptamine derivatives from serine and substituted indole derivatives was demonstrated using a range of tryptophan synthase and tryptophan decarboxylase enzymes. To further demonstrate the utility of this one-pot cascade, a reaction was set up containing wild-type tryptophan synthase and tryptophan decarboxylase from Panaeolus cyanescens (PanCyTrpB, SEQ ID NO: 255 and PanCyPsiD, SEQ ID NO: 77), coupled with additional enzymes which could further convert the substituted tryptamine derivative produced by PanCyTrpB and PanCyPsiD into more complex derivatives when fed with the corresponding substituted indole derivative and serine. In this example, PanCyPsiK (SEQ ID NO: 159) and PanCyPsiM (SEQ ID NO: 127) were added as additional derivatizing enzymes and serine and 4-hydroxyindole used as the fed substrates. The promiscuous PanCyTrpB and PanCyPsiD converts these substrates into 4-hydroxytryptamine which PanCyPsiK further derivatizes to norbaeocystin followed by PanCyPsiM mediated derivatization to baeocystin then psilocybin. The assay was set up according to Example 22 with X6 mM serine and X3 mM 4-hydroxyindole added, Table 29 shows the results from the experiment. The results showed that a one-pot biocatalytic cascade could be used to efficiently produce psilocybin from serine and 4-hydroxyindole. Due to the instability of the phosphate group of psilocybin, degradation to psilocin was also observed.

TABLE 29
Production of complex substituted tryptamine derivatives by one-pot in
vitro biocatalytic cascade from serine and 4-hydroxyindole (in mM).

| | | Products | | | | | |
|---|---|---|---|---|---|---|---|
| | Enzymes | 4- | 4- | | | | |
| Substrate | added | hydroxytryptophan | hydroxytryptamine | Norbaeocystin | Baeocystin | Psilocybin | Psilocin |
| 4- | PanCyTrpB | 0.66 | 0.13 | 0.06 | 0.29 | 0.69 | 0.37 |
| Hydroxyindole | PanCyPsiD | | | | | | |
| | PanCyPsiK | | | | | | |
| | PanCyPsiM | | | | | | |

### Conclusion

[0591] These results showed that the superior catalytic activity of PanCyTrpB and PanCyPsiD can be further utilized as a starting point to produce more complex substituted tryptamine derivatives.

### Example 24—Production of N-Feruloyl Serotonin by Engineered S. cerevisiae

[0592] In example 13, yeast was engineered to produce the potent antioxidant and anti-hyperpigmentation compound 4-coumaroyl serotonin by introducing genes for the production of serotonin from tryptophan (RgTdc, OsT5H, FoCPR), genes for the production of 4-coumaroyl-CoA from phenylalanine (ARO7(G141S), ARO8, Pal2, C4 h, Atr2, 4CI), and finally an enzyme to derivatize serotonin with 4-Coumoryl CoA to produce 4-Coumoryl serotonin (CaSHT). Functional expression of an N-(hydroxycinnamoyl) transferase (CaSHT), opened the possibility of producing other serotonin derivatives as this enzyme is known to functionalize serotonin was a range of hydroxycinnamoyl derivatives including coumaroyl-CoA, caffeoyl-CoA, cinnamoyl-CoA and feruloyl-CoA leading to the production of N-coumaroylserotonin (demonstrated above), N-caffeoylserotonin, N-cinnamoylserotonin and N-feruloylserotonin. To further demonstrate the utility of this enzyme, yeast was engineered to produce N-feruloylserotonin from exogenously fed ferulic acid by introduction of genes to produce serotonin from tryptophan (CrTdc, SEQ ID NO: 25, OsT5H, SEQ ID NO: 95, FoCPR, SEQ ID NO: 111), a gene to convert ferulic acid to feruloyl-CoA (4CL2, SEQ ID NO: 57), and the gene to conjugate feruloyl-CoA and serotonin to N-feruloylserotonin (CaSHT, SEQ ID NO: 161). The strain (SC-NFS) was constructed according to Example 1, cultivated according to Example 4 with the addition of 1 mM ferulic acid to the media, and the concentration of N-feruloylserotonin was quantified according to Example 8. As shown in Table 30, SC-NFS was able to convert a substantial amount of exogenously added ferulic acid into N-feruloylserotonin, thereby demonstrating the utility of the CaSHT enzyme and the use of yeast to produce complex serotonin derivatives.

TABLE 30
Production of N-feruloylserotonin (in mM) by engineered
yeast fed 1 mM ferulic acid. ND: Not detected.

| Strain | Ferulic acid | N-feruloylserotonin |
|---|---|---|
| BY4741 | 0.97 | ND |
| SC-NFS | 0.34 | 0.45 |

### Conclusion

[0593] These results show that instead of producing the corresponding cinnamic acid de novo (as demonstrated in the de novo production of 4-coumaroylserotonin), hydroxycinnamoyl derivatives such as N-feruloylserotonin can also be produced simply by feeding the inexpensive hydroxycinnamic acid (ferulic acid in this case).

### Example 25—Production of Melatonin by Engineered Yeast Strains

[0594] In example 12 it was shown that serotonin could be produced in yeast by integration and expression of a tryptophan decarboxylase (e.g. CrTdc) and a CYP/CPR pair, tryptamine 5-hydroxylase and cytochrome P450 reductase (OsT5H, FoCPR). Examples 13 and 24 further showed how this serotonin producing strain could be further engineered to produce more complex derivatives (4-coumaroylserotonin, N-feruloylserotonin). Here, the serotonin producing strain (SC-75) was further engineered to produce human hormone and nutraceutical melatonin by further integration and expression of an acetyl-serotonin methyltransferase (HsASMT, SEQ ID NO: 117) and a serotonin N-acetyltransferase (BtAANAT, SEQ ID NO: 141). Strains were constructed according to Example 1, cultivated according to Example 4 and quantified according to Example 8. As shown in Table 31 and FIG. 19, integration of HsASMT and BtAANAT into the serotonin producing strain resulted in the production of melatonin.

TABLE 31
Melatonin production by engineered S. cerevisiae strains in mg/L,
data presented as averages of triplicate experiments. ND: Not detected

| | Genotype | | | |
|---|---|---|---|---|
| Strain | description | Tryptamine | Serotonin | Melatonin |
| BY4741 | Wild-type | ND | ND | ND |
| SC-75 | Serotonin parental | 10.45 | 630.56 | ND |
| | strain | | | |
| SC-124 | Melatonin | ND | 422 | 26 |
| | producer | | | |

### Conclusion

[0595] The results of this experiment showed that efficient serotonin production by OsT5H and FoCPR can be further utilized to produce more complex serotonin derivatives such as melatonin. This offers significant improvements over microbial methods to produce melatonin known in the art (e.g. WO2013127915) which rely on the inefficient serotonin production pathway via 5-hydroxytryptophan requiring a tetrahydrobiopterin co-factor.

### Example 26—Production and Purification of Psilocin-O-β-Glucoside by One-Pot In Vitro Biocatalytic Cascade Using 4-Hydroxyindole, Serine and UDP-Glucose

[0596] To produce larger amounts of psilocin glucoside for further testing, a one-pot in vitro biocatalytic cascade was set up to produce psilocin glucoside directly from 4-hydroxyindole, serine and UDP-glucose. The reaction was set up in a similar fashion to Example 23 with PanCyTrpB, PanCyPsiD, PanCyPsiK and PanCyPsiM added to convert 4-hydroxyindole and serine to psilocybin. In Example 23, degradation of psilocybin to psilocin was observed which we utilized here to provide a substrate to the UGT enzyme At71C2 (SEQ ID NO's. 193, 194) also added in the one-pot reaction along with UDP-glucose to convert available psilocin into psilocin-O-β-glucoside as it degraded from psilocybin. The reaction was scaled-up to 20 mL with approximately 15 mg of each enzyme added to the reaction with 1 mM of 4-hydroxyindole, 1 mM of serine, and 3 mM of UDP-glucose, and alkaline phosphatase (as in Example 10). The reaction was incubated for 24 h at 30° C., then terminated by heating at 80° C. to degrade the proteins as well as any unreacted psilocybin and psilocin and then filtered through a 0.2 μm polyvinylidene fluoride (PVDF) filter prior to purification on Preparative HPLC. This yielded a final psilocin-O-β glucoside concentration of 0.3 mg/mL, indicating a yield from 4-hydroxyindole and serine of approximately 75%. Psilocin-O-β-glucoside was purified by preparative HPLC from the reaction mix as follows: The filtered assay mix was loaded on a Phenomenex Kinetex F5 column (250×21.2 mm, 5 um, 100 Å) on an Agilent 1290 preparative HPLC system equipped with a fraction collector and UV-detector. Gradient elution at a flow rate of 15 ml/min was employed using water with 0.01% trifluoroacetic acid (TFA) and methanol with 0.01% TFA as mobile phases A and B, respectively. The gradient was: 0-1 min: 2% B, 1-30 min: 2-98% B, 30-35 min: 98% B, 30-37 min: 98-2% B. Peaks with an area above 15 units and a up slope above 0.60 Units/s were collected using automatic peak detection at 230 nm. The fraction containing psilocin glucoside was dried in vacuo to yield a white powder (final. Yield: 7.9 mg). The identity of psilocin-O-β-glucoside was confirmed by LC-MS/QTOF: Calculated [M+H]+: m/z 367.1864. Observed [M+H]+: m/z 367.1865. MS2(367.1865): m/z 205.1339 corresponding to loss of the glucoside-moiety.

### Example 27—Testing the Chemical Stability of Psilocin Glucoside

[0597] Prior art demonstrates that psychedelic compound psilocin is highly unstable, with rapid degradation even under ambient conditions. While the added phosphate group of psilocybin helps protect the molecule from degradation, psilocybin is also relatively unstable, prone to dephosphorylation to psilocin and subsequent degradation. The instability of these molecules hinders formulation and delivery of the compound for therapeutic use. To improve the chemical stability of the active compound psilocin, glycosylation can be used as an effective strategy. To demonstrate the effectiveness of psilocin glycosylation, purified psilocin glucoside, along with psilocin and psilocybin was subjected to a range of harsh environmental conditions according to Example 9. Degradation of each compound was assessed by measuring the amount of compound remaining after 24 h exposure to each condition. As shown in Table 32 psilocin-O-β-glucoside shows remarkable stability in all conditions tested showing practically no signs of degradation even under particularly harsh conditions. In stark contrast, psilocin showed complete degradation under all conditions tested with zero psilocin detected after 24 h exposure, thereby demonstrating the high instability of the compound. While psilocybin showed much less degradation compared to psilocin, demonstrating that the added phosphate group does protect the molecule from degradation, it still showed signs of degradation and significantly underperformed psilocin glucoside in this stability study. These results show how glycosylation is a much better strategy for protecting psilocin from degradation than phosphorylation.

TABLE 32
Chemical stability of psilocybin, psilocin and psilocin
glucoside incubated under a range of conditions. Shown
is the % of compound remaining after incubation for 24 h.

| | | | Psilocin |
|---|---|---|---|
| | Psilocin | Psilocybin | glucoside |
| Condition | % left after 24 h | | |
| pH = 1.1 | 0.0 | 94.0 | 100.0 |
| pH = 12.5 | 0.0 | 93.0 | 100.0 |
| 3% H2O2 | 0.0 | 87.0 | 100.0 |
| 80° C. | 0.0 | 84.6 | 100.0 |
| 30° C. | 0.0 | 97.5 | 100.0 |
| 4° C. | 0.0 | 97.5 | 100.0 |
| Control | 100.0 | 100.0 | 100.0 |

### Conclusion

[0598] Psilocybin is a prodrug of psilocin, whereby the added phosphate group acts to stabilize the molecule and prevent degradation. This experiment shows that glycosylation of psilocin is a better strategy to stabilize the molecule than phosphorylation (psilocybin), thereby providing opportunity to develop new prodrugs of this active molecule.

### Example 28—Production of Psilocin Glucoside by Engineered Yeast

[0599] In previous examples, psilocin-O-β-glucoside was produced in vitro using the highly active UGT At71C2 (SEQ ID NO: 193) which converted psilocin to psilocin glucoside when exogenous UDP-glucose was added. Psilocin glucoside was produced either by feeding psilocin directly to the UGT reaction, or by producing it in a one-pot biocatalytic cascade from 4-hydroxyindole and serine, and relying on the inherent instability of psilocybin to degrade to psilocin to provide the psilocin substrate for the glycosylation reaction. In this example, psilocin glucoside was produced in yeast by two different production methods; Bioconversion, whereby At71C2 was introduced into a wild-type yeast strain (BY4741) and psilocin glucoside produced by feeding psilocin to the strain during cultivation, and de novo production, whereby At71C2 was introduced into a yeast strain engineered to efficiently produce psilocybin (SC-276). Strains were constructed according to Example 1, cultivated according to Example 4 and quantified according to Example 8. For the bioconversion cultivation, strains were fed with 100 mg/L psilocin. As shown in Table 33, expression of At71C2 resulted in production of psilocin glucoside by both production methods. While SC-276 produces psilocybin with psilocin produced as a byproduct, when At71C2 is introduced (SC-402) psilocin is further converted into psilocin glucoside. For the bioconversion strain (SC-394) only psilocin glucoside is detected (15.59 mg/L, even though 100 mg/L of psilocin was fed during the cultivation. The absence of further psilocin is likely due to the high instability of the molecule.

TABLE 33
Production of psilocin glucoside in yeast strains expressing UGT At71C2 in either a wild-type
background (Bioconversion strain) or in a psilocybin producing background (De novo strain).
Data presented in mg/L and as the average of triplicate experiments. ND: Not detected.

| | | | | Psilocin |
|---|---|---|---|---|
| Strain | Genotype description | Psilocybin | Psilocin | glucoside |
| BY4741 | Wild-type | ND | ND | ND |
| SC-276 | Psilocybin parental strain | 131.2 | 56.4 | ND |
| SC-394 | Bioconversion strain | ND | ND | 15.59 |
| SC-402 | De novo strain | 98.4 | ND | 10.2 |

### Conclusion

[0600] This experiment demonstrated another method for producing tryptamine glycosides. While previous examples demonstrated tryptamine glycoside production using an in vitro biocatalytic approach, this experiment showed that in vivo bioconversion and de novo production in yeast is also feasible. This opens multiple avenues for industrially producing such new molecules.

### Example 29—Production of Psilocybin by Engineered Yeast Expression Genes from Panaeolus Cyanescens

### Part 1

[0601] While Psilocybe cubensis is perhaps the most well-known species to produce psilocybin, a diverse number of species are also known to produce psilocybin. However, to date, only the psilocybin biosynthetic pathway from P. cubensis has been elucidated, with genes discovered to convert tryptophan to psilocybin in 5 enzymatic steps. Mining the genomes of other psilocybin producing species can uncover new gene homologues which could have improved activity compared to the well-known gene candidates from P. cubensis. Through genome mining, a putative set of psilocybin biosynthetic genes were identified in the fungal species Panaeolus cyanescens, including a putative tryptophan decarboxylase (PanCyPsiD, SEQ ID NO: 77), tryptamine 4-hydroxylase (PanCyPsiH, SEQ ID NO: 87), cytochrome P450 reductase (PanCyCPR, SEQ ID NO: 105), 4-hydroxytryptamine kinase (PanCyPsiK, SEQ ID NO: 159), and psilocybin synthase (PanCyPsiM, SEQ ID NO: 127). Interestingly, these putative genes had only approximately 80% amino acid sequence homology to their homologues from P. cubensis, potentially indicating differential activity. To test the functionality of these enzymes and to compare their activity against homolog enzymes from P. cubensis, each gene set was introduced into a high producing tryptamine background (SC-106) according to Example 1, cultivated according to Example 4, and the concentration of psilocybin and other byproducts and intermediates quantified according to Example 8 to directly compare the biocatalytic capacity of each set of enzymes. The results shown in Table 34 and FIG. 18 show that introducing genes from both species results in the production of psilocybin, however introducing genes from P. cyanescens results in higher production than genes from P. cubensis. Overall demonstrating the superior catalytic activity of enzymes sourced from P. cyanescens. A lower accumulation of tryptamine was also observed in SC-268 compared to SC-275, again supporting the improved activity of the P. cyanescens biosynthetic pathway.

TABLE 34
Production of psilocybin in S. cerevisiae strains containing the
psilocybin biosynthetic pathway from P. cubensis and P. cyanscens.
Data is presented in mg/L and is the average of
triplicate expriments. ND: Not detected.

| | Genotype | | | |
|---|---|---|---|---|
| Strain | description | Tryptamine | Psilocybin | Psilocin |
| BY4741 | Wild-type | ND | ND | ND |
| SC-106 | Tryptamine | 448.62 | ND | ND |
| | producer parental | | | |
| | strain | | | |
| SC-275 | Psilocybin pathway | 13.56 | 345.14 | 50.12 |
| | from Psilocybe | | | |
| | cubensis | | | |
| SC-268 | Psilocybin pathway | 9.03 | 431.23 | 78.67 |
| | from Panaeolus | | | |
| | cyanescens | | | |

### Part 2

[0602] Further genome mining identified a gene encoding a putative cytochrome b5 (PanCyCYB5, SEQ ID NO: 253). Heterologous expression of cytochrome b5 proteins has previously been shown to improve CYP/CPR reactions (WO/2021/052989) but is usually specific for expression of cytochrome b5 from the same species as the CYP/CPR pair, thereby necessitating the expression of the Panaeolus cyanescens cytochrome b5 in order to improve the activity of the PanCyPsiH/PanCyCPR CYP/CPR pair. The putative cytochrome b5 (PanCyCYB5) was integrated and expressed in a strain expressing the psilocybin biosynthetic pathway from Panaeolus cyanescens according to Example 1, cultivated according to Example 4, and the concentration of psilocybin and other byproducts and intermediates quantified according to Example 8. The results shown in Table 35 show that additional expression of PanCyCYB5 improves psilocybin production by improving the conversion of tryptamine to 4-hydroxytryptamine. While some tryptamine accumulation was observed in SC-269, tryptamine was not detected in SC-270 indicating improved hydroxylation activity and full conversion of available tryptamine to 4-hydroxytryptamine.

TABLE 35
Increased production of psilocybin in stains expressing the psilocybin biosynthetic pathway
from P. cyanescens with additional expression of PanCyCYB5. Data is presented
in mg/L and is the average of triplicate experiments. ND: Not detected.

| Strain | Genotype description | Tryptamine | Psilocybin | Psilocin |
|---|---|---|---|---|
| BY4741 | Wild-type | ND | ND | ND |
| SC-269 | Psilocybin pathway | 18.45 | 424.43 | 68.12 |
| | from Panaeolus | | | |
| | cyanescens | | | |
| SC-270 | Psilocybin pathway | ND | 498.34 | 79.43 |
| | from Panaeolus | | | |
| | cyanescens with CYB5 | | | |

### Conclusion

[0603] This experiment shows that enzymes from other psilocybin species can be introduced into yeast to enable the heterologous production of psilocybin, even enzymes with relatively low sequence homology to genes known in the art. The results also demonstrate that introducing genes from Panaeolus cyanescens into yeast to produce psilocybin is a better strategy than introducing genes from Psilocybe cubensis with higher production observed. These results also demonstrate that cytochrome b5 expression can work in conjunction with the cytochrome p450 reductase to further enhance the catalytic activity of tryptamine 4-hydroxylase.

### Example 30—High Level Production of Psilocybin by Engineered S. cerevisiae

[0604] In previous examples a range of substituted tryptamine derivatives were produced by engineered S. cerevisiae strains. This was achieved by integrating derivatizing enzymes into yeast strains engineered to efficiently produce high amounts of the precursor tryptamine. For example, integration of OsT5H and FoCPR into high tryptamine producer SC-106 resulted in high level production of serotonin. In this example high producing psilocybin strains using genes from P. cubensis and P. cyanscens were constructed by combining beneficial genetic modifications from previous examples. These strains combined various optimized pathways leading to psilocybin and included the introduction of a phosphoketolase bypass (CkPta, BbXfpk, gpp1Δ) to increase Erythrose 4-phosphate, an optimized Chorismate pathway (ARO4(K229 L), ARO1, ARO2, RIC1Δ) to improve converse of Erythrose 4-phosphate and Phosphoenolpyruvate to Chorismate, and optimized tryptamine pathway (TRP2 (S65R, S76 L), BsPrs, TRP4, TRP1, TRP3, CrTdc) to convert Chorismate to Tryptophan then decarboxylation to Tryptamine, with deletion of ARO10 and PDC5 to eliminate production of Tryptophol from Tryptophan, an optimized psilocybin pathway (PsiH, CPR, PsiK, PsiM, CYB5) to convert Tryptamine to Psilocybin with deletion of ERG4 to increase S-adenosylmethionine availability (a substrate for methylation by PsiM), and finally deletion of native phosphatase genes (DIA3Δ, PHO5Δ, PHO3Δ) to prevent degradation of psilocybin to psilocin. During the course of the strain construction process it was found that some biosynthetic pathway steps were rate-limiting, in these cases it was found that overexpression of a 2^{nd} copy of the corresponding gene significantly improved production (ARO4(K229 L), TRP2 (S65R, S76 L), PsiK, PsiM). A summary of all the genetic modifications made leading to optimized psilocybin production strains is shown in Table 36.

TABLE 36
Summary of genetic modifications for the optimized production
of psilocybin in S. cerevisiae. Δ denotes the gene was
knocked-out, ×2 denotes the gene was overexpressed two times.

| | Genes | |
|---|---|---|
| Pathway | overexpressed/ | |
| optimized | KO’d | SEQ ID NO’s |
| Phosphoketolase | CkPta | SEQ ID NO: 3 |
| bypass | BbXfpk | SEQ ID NO: 1 |
| | GPP1Δ | SEQ ID NO: 34 |
| Chorismate | ARO4 | SEQ ID NO: 5 |
| pathway | (K229L) × 2 | |
| | ARO1 | SEQ ID NO: 7 |
| | ARO2 | SEQ ID NO: 11 |
| | RIC1Δ | SEQ ID NO: 33 |
| Tryptamine | TRP2 | SEQ ID NO: 13 |
| pathway | (S65R, S76L) × 2 | |
| | BsPrs | SEQ ID NO: 15 |
| | TRP4 | SEQ ID NO: 17 |
| | TRP1 | SEQ ID NO: 19 |
| | TRP3 | SEQ ID NO: 21 |
| | CrTdc | SEQ ID NO: 25 |
| | PDC5Δ | SEQ ID NO: 38 |
| | ARO10Δ | SEQ ID NO: 37 |
| Psilocybin | PsiH | SEQ ID NO: 87, 93 |
| pathway | CPR | SEQ ID NO: 101, 105 |
| | PsiK × 2 | SEQ ID NO: 155, 159 |
| | PsiM × 2 | SEQ ID NO: 123, 127 |
| | CYB5 | SEQ ID NO: 253 |
| | ERG4Δ | SEQ ID NO: 183 |
| Psilocybin | DIA3Δ | SEQ ID NO: 40 |
| degradation | PHO5Δ | SEQ ID NO: 41 |
| | PHO3Δ | SEQ ID NO: 44 |

[0605] Strains were constructed according to Example 1, cultivated according to Example 4 and metabolites quantified according to Example 8. As shown in Table 37 combining beneficial genetic modifications led to significant improvement in psilocybin titer with a more than 2-fold improvement in titer and almost no psilocin accumulation.

TABLE 37
High level production of psilocybin in optimized production
strains expression the psilocybin biosynthetic pathway from
P. cubensis and P. cyanascens. The date is presented in mg/L
and is the average of triplicate experiments. ND: Not detected.

| Strain | Genotype description | Tryptamine | Psilocybin | Psilocin |
|---|---|---|---|---|
| BY4741 | Wild-type | ND | ND | ND |
| SC-106 | Tryptamine producer | 546.6 | ND | ND |
| | parental strain | | | |
| SC-275 | Psilocybin pathway | 9.67 | 313.34 | 47.56 |
| | from Psilocybe | | | |
| | cubensis | | | |
| SC-268 | Psilocybin pathway | 13.57 | 410.23 | 61.48 |
| | from Panaeolus | | | |
| | cyanescens | | | |
| SC-415 | Improved psilocybin | ND | 869.96 | 9.45 |
| | pathway from | | | |
| | Psilocybe cubensis | | | |
| SC-416 | Improved psilocybin | ND | 986.56 | 4.65 |
| | pathway from | | | |
| | Panaeolus cyanescens | | | |

### Conclusion

[0606] The results of this experiment showed that combining beneficial genetic modifications together resulted in significant improvement in psilocybin production. These results surprisingly showed that different highly engineered metabolic pathways could act synergistically to improve production of the overall final product. Combining strategies to improve flux through the main metabolic pathway (tryptophan pathway), decreased flux through competing pathways (pentose phosphate pathway, phenylalanine/tyrosine pathway, ergosterol pathway), improved co-substrate availability (SAM), and removed degradation pathways (tryptophol, psilocin) and led to significant improvements in psilocybin production that could only be achieved through this combined engineering effort.

### Example 31—Production of baeocystin by engineered S. cerevisiae

[0607] Wild-type psilocybin synthase (PcPsiM, SEQ ID NO: 123) efficiently catalyzes the iterative methylation of norbaeocystin to baeocystin then to psilocybin. However, a variant of this enzymes is known in the art which only catalyzes the first methylation of norbaeocystin to baeocystin (PcPsiM(H210A), SEQ ID NO: 129) (Janis Fricke, 2019). When integrated into S. cerevisiae, this variant could be used to produce baeocystin instead of psilocybin. To demonstrate the applicability of this gene variant the full psilocybin biosynthetic pathway from P. cubensis was integrated into high producing tryptamine strain SC-106 but instead of wild-type PcPsiM, the variant PcPsiM(H210A) was instead integrated. Strains were constructed according to Example 1, cultivated according to Example 4 and the resulting metabolites quantified according to Example 8. The results shown in Table 38 demonstrate how integration of PcPsiM(H210) results in only the production of baeocystin with no psilocybin detected. The dephosphorylated degradation production of baeocystin, norpsilocin was also detected which is to be expected given the high concentration of baeocystin produced and the presumably low stability of the phosphorylated molecule, as has been observed for psilocybin.

TABLE 38
Production of baeocystin by engineered S. cerevisiae strains
in mg/L. Data presented as averages of triplicate experiments.

| | Genotype | | | | | |
|---|---|---|---|---|---|---|
| Strain | description | Tryptamine | Psilocybin | Psilocin | Baeocystin | Norpsilocin |
| BY4741 | Wild-type | ND | ND | ND | ND | ND |
| SC-106 | Tryptamine | 548.45 | ND | ND | ND | ND |
| | producer parental | | | | | |
| | strain | | | | | |
| SC-275 | Psilocybin | 10.34 | 312.23 | 39.43 | 2.45 | 0.12 |
| | pathway from | | | | | |
| | Psilocybe cubensis | | | | | |
| SC-417 | Baeocystin | 8.34 | ND | ND | 218.34 | 23.5 |
| | pathway from | | | | | |
| | Psilocybe cubensis | | | | | |

ND: Not detected.

### Conclusion

[0608] These results showed that yeast could also serve as a production host to produce this mono-methylated intermediate, alleviating the need to add expensive substrates and co-factors as described for in vitro methods known in the art.

1. A method for producing a tryptamine derivative of formula (I): [chemical structure]
wherein the tryptamine derivative (I) is not tryptophane, 4-hydroxytryptamine, N-acetyl-4-hydroxytryptamine, norbaeocystin, baeocystin; psilocybin, psilocin, aeruginascin, halogenated tryptophan, halogenated tryptamine, halogenated N-methylated tryptamine, halogenated N,N-dimethyltryptamine or halogenated N,N,N-trimethyltryptamine; said method comprising providing an indole acceptor of the formula (II): [chemical structure]
wherein one or more of R_{II}, R_{IV}, R_{V}, R_{VI} or R_{VII} is not H and R_{III} is H or CH₂CH₂NH₂ or CH₂CHCOOHNH₂; and contacting the indole acceptor with a substituent donor in the presence of one or more enzymes substituting one or more H, OH and/or COOH in the indole acceptor with one or more substituents of the substituent donor.

2. The method of claim 1, wherein one or more of RII, RIV, RV, RVI and/or RVII of the indole acceptor (II) is OH, Cl, Br, F, I, CH3, NO2, or CH3-O.

3. The method of claim 1, wherein R4 and/or R5 is OH.

4. The method of claim 1 or 2, wherein the indole acceptor (II) is selected from 4-hydroxytryptamine, 5-hydroxytryptamine, Psilocybin, Psilocin, Norpsilocin, Baeocystin, Norbaeocystin, Aeruginascin, 4-hydroxy-N,N,N-trimethyltryptamine, Bufotenine, Norbufotenine, 5-hydroxy-N,N,N-trimethyltryptamine, 4-methoxytyptamine, 5-methoxytryptamine N-acetylserotonin, Ibogaine, Ibogamine, Noribogaine, Mitragynine, 7-OH-mitragynine, 4-HO-DET, 4-HO-DiPT, 4-HO-MET, 4-HO-MiPT, 4-HO-McPT, 4-HO-DPT, and 4-HO-DSBT, Harmalol.

5. The method of any preceding claim, wherein the substituent is an alkyl group, an acetyl group, a glycosyl group, a phosphate group, an oxygenyl group, a hydroxyl group or a halogenyl group.

6. The method of any preceding claim, wherein the alkyl group is an ethyl or a methyl group.

7. The method of claim 5, wherein the glycosyl group moiety of the glycosyl group comprises one or more of glucose, galactose, xylose, mannose, galactofuranose, arabinose, rhamnose, apiose, fucose, glucosamine, galactosamine, N-acetylglucosamine, N-acetylgalactosamine, xylosamine, mannosamine, arabinosamine, rhamnosamine, apiosamine, fucosamine, glucuronate, galacturonate, mannuronate, arabinate, apionate or a combination thereof.

8. The method of claim 5, wherein the substitution is an O-alkylation, a N-alkylation, or a C-alkylation.

9. The method of claim 8, wherein the alkylation is an ethylation or a methylation.

10. The method of claim 5, wherein the substitution is an N-acetylation

11. The method of claim 5, wherein the substitution is an O-glycosylation, optionally a β-O-glycosylation.

12. The method of any preceding claim, wherein the substituent donor is an aldehyde, a ketone, an ether and/or an amine.

13. The method of claim 12, wherein the aldehyde is acetaldehyde, oxaloacetaldehyde or secologanin.

14. The method of claim 12, wherein the ketone is cinnamoyl-CoA or pyruvate

15. The method of claim 12, wherein the ether is a glycoside.

16. The method of claim 15, wherein glycoside is a nucleotide glycoside.

17. The method of claim 16, wherein the nucleotide glycoside is NTP-glycoside, NDP-glycoside or NMP-glycoside.

18. The method of claim 17, wherein the nucleoside of the nucleotide glycoside is selected from Uridine, Adenosin, Guanosin, Cytidin and deoxythymidine.

19. The method of claim 18, wherein the nucleotide glycoside is selected from UDP-glycosides, ADP-glycosides, CDP-glycosides, CMP-glycosides, dTDP-glycosides and GDP-glycosides.

20. The method of claim 19, wherein the nucleotide glycoside is selected from UDP-D-glucose (UDP-Glc); UDP-galactose (UDP-Gal); UDP-D-xylose (UDP-Xyl); UDP-N-acetyl-D-glucosamine (UDP-GIcNAc); UDP-N-acetyl-D-galactosamine (UDP-GaINAc); UDP-D-glucuronic acid (UDP-GIcA); UDP-D-galactofuranose (UDP-Galf); UDP-arabinose; UDP-rhamnose, UDP-apiose; UDP-2-acetamido-2-deoxy-α-D-mannuronate; UDP-N-acetyl-D-galactosamine 4-sulfate; UDP-N-acetyl-D-mannosamine; UDP-2,3-bis(3-hydroxytetradecanoyl)-glucosamine; UDP-4-deoxy-4-formamido-β-L-arabinopyranose; UDP-2,4-bis(acetamido)-2,4,6-trideoxy-α-D-glucopyranose; UDP-galacturonate; UDP-3-amino-3-deoxy-α-D-glucose; guanosine diphospho-D-mannose (GDP-Man); guanosine diphospho-L-fucose (GDP-Fuc); guanosine diphospho-L-rhamnose (GDP-Rha); cytidine monophospho-N-acetylneuraminic acid (CMP-Neu5Ac); cytidine monophospho-2-keto-3-deoxy-D-mannooctanoic acid (CMP-Kdo); and ADP-glucose.

21. The method of claim 12, wherein the amine is S-Adenosyl methionine (SAM) or S-Adenosyl ethionine (SAE).

22. The method of any preceding claim, wherein the one or more enzymes is selected from glycosyltransferases, alkyltransferases, synthases, acetyltransferases, kinases, cinnamoyltransferases, phosphatases, laccases, halogenases, P450 enzymes, flavin monooxygenases, and/or lyases.

23. The method of claim 22, wherein the glycosyltransferase is derived from a plant or a fungus.

24. The method of claim 23, wherein the plant is selected from Oryza sativa, Crocus sativus, Nicotiana tabacum, Stevia rebaudiana, Nicotiana benthatamiana and Arabidopsis thaliana.

25. The method of claim 22 to 24, wherein the glycosyl transferase is an O-glycoside transferase and/or a C-glycoside transferase.

26. The method of claim 25, wherein the glycosyl transferase is an aglycone O-glycosyltransferase.

27. The method of claim 25, wherein the glycosyl transferase is a glycoside O-glycosyltransferase.

28. The method of claim 25, wherein the glycosyl transferase is an aglycone O-glucosyltransferase.

29. The method of claim 25, wherein the glycosyl transferase is an aglycone O-rhamnosyltransferase.

30. The method of claim 25, wherein the glycosyl transferase is an aglycone O-xylosyltransferase.

31. The method of claim 25, wherein the glycosyl transferase is an aglycone O-arabinosyltransferase.

32. The method of claim 25, wherein the glycosyl transferase is an aglycone O-N-acetylgalactosaminyltransferase.

33. The method of claim 25, wherein the glycosyl transferase is an aglycone O-N-acetylglucosaminyltransferase.

34. The method of claim 25, wherein the glycosyl transferase is an aglycone/glycoside mono-O-glycosyltransferase.

35. The method of claim 25, wherein the glycosyl transferase is an aglycone/glycoside di-O-glycosyltransferase.

36. The method of claim 25, wherein the the glycosyl transferase is an aglycone/glycoside tri-O-glycosyltransferase.

37. The method of claim 25, wherein the glycosyl transferase is an aglycone/glycoside tetra-O-glycosyltransferase.

38. The method of claim 25, wherein the glycosyl transferase is a hydroxytryptamine glycosyltransferase.

39. The method of claim 25, wherein the glycosyl transferase is selected from EC2.4.1.-, and EC2.4.2.

40. The method of claim 39, wherein the glycosyl transferase is selected from EC2.4.1.17, EC2.4.1.35, EC2.4.1.159, EC2.4.1.203, EC2.4.1.234, EC2.4.1.236 and EC2.4.1.294.

41. The method of claim 39, wherein the glycosyl transferase is selected from EC2.4.2.40.

42. The method of claim 25, wherein the glycosyl transferase has at least 70%, such at least 75%, such as at least 80%, such as at least 90%, such as at least 95%, such as at least 99%, such as 100% identity to the glycosyl transferase comprised in anyone of SEQ ID NO: 80, 82, 84, 86, 188, 190, 192, 194, 196, 198, 200, 202, 204, 206, 208, 210, 212, 214, 216, 218, 220, 222, 224, 226, 228, 230, 232, 234, 236, 238, 240, 242, 244, 246, 248, 250 and/or 252.

43. The method of claim 42, wherein the glycosyl transferase has at least 70%, such at least 75%, such as at least 80%, such as at least 90%, such as at least 95%, such as at least 99%, such as 100% identity to the glycosyl transferase comprised in anyone of SEQ ID NO: 194 and/or 204.

44. The method of claim 22, wherein the alkyl transferase is a methyltransferase.

45. The method of claim 44, wherein the methyltransferase is an O-methyltransferase, a N-methyltransferase or a C-methyltransferase.

46. The method of claim 44, wherein the O-methyltransferase has at least 70%, such at least 75%, such as at least 80%, such as at least 90%, such as at least 95%, such as at least 99%, such as 100% identity to the O-methyltransferase comprised in anyone of SEQ ID NO: 114, 116, 118 and/or 120.

47. The method of claim 44, wherein the N-methyltransferase has at least 70%, such at least 75%, such as at least 80%, such as at least 90%, such as at least 95%, such as at least 99%, such as 100% identity to the N-methyltransferase comprised in anyone of SEQ ID NO: 122, 124, 126, 128, 130, 132, 134 136 and/or 138.

48. The method of claim 44, wherein the C-methyltransferase has at least 70%, such at least 75%, such as at least 80%, such as at least 90%, such as at least 95%, such as at least 99%, such as 100% identity to the C-methyltransferase comprised in SEQ ID NO: 140.

49. The method of claim 22, wherein the synthase is a Strictosidine synthase or a 1-acetyl-β-carboline synthase.

50. The method of claim 49, wherein the Strictosidine synthase has at least 70%, such at least 75%, such as at least 80%, such as at least 90%, such as at least 95%, such as at least 99%, such as 100% identity to the Strictosidine synthase comprised in anyone of SEQ ID NO: 144 146, 148 and/or 150.

51. The method of claim 49, wherein the 1-acetyl-β-carboline synthase has at least 70%, such at least 75%, such as at least 80%, such as at least 90%, such as at least 95%, such as at least 99%, such as 100% identity to the 1-acetyl-β-carboline synthase comprised in anyone of SEQ ID NO: 152 and/or 154.

52. The method of claim 22, wherein the acetyltransferase is an aralkylamine N-acetyltransferase, optionally an aralkylamine N-acetyltransferase which has at least 70%, such at least 75%, such as at least 80%, such as at least 90%, such as at least 95%, such as at least 99%, such as 100% identity to the aralkylamine N-acetyltransferase comprised in SEQ ID NO: 142.

53. The method of claim 22, wherein the kinase is a 4-Hydroxytryptamine kinase and/or a 7-hydroxytryptamine kinase optionally a 4-Hydroxytryptamine kinase and/or a 7-hydroxytryptamine kinase which has at least 70%, such at least 75%, such as at least 80%, such as at least 90%, such as at least 95%, such as at least 99%, such as 100% identity to the 4-Hydroxytryptamine kinase and/or 7-hydroxytryptamine kinase comprised in anyone of SEQ ID NO: 156, 158, and/160.

54. The method of claim 22, wherein the cinnamoyltransferase is a N-hydroxycinnamoyltransferase, optionally a N-hydroxycinnamoyltransferase which has at least 70%, such at least 75%, such as at least 80%, such as at least 90%, such as at least 95%, such as at least 99%, such as 100% identity to the N-hydroxycinnamoyl transferase comprised in SEQ ID NO: 162.

55. The method of claim 22, wherein the phosphatase is a psilocybin phosphatase, optionally a psilocybin phosphatase which has at least 70%, such at least 75%, such as at least 80%, such as at least 90%, such as at least 95%, such as at least 99%, such as 100% identity to the psilocybin phosphatase comprised in SEQ ID NO: 164.

56. The method of claim 22, wherein the laccase is a psilocin laccase, optionally a psilocybin laccase which has at least 70%, such at least 75%, such as at least 80%, such as at least 90%, such as at least 95%, such as at least 99%, such as 100% identity to the psilocin laccase comprised in SEQ ID NO: 166.

57. The method of claim 22, wherein the halogenase is a Tryptophan 2-halogenase, a Tryptophan 5-halogenase, a Tryptophan 6-halogenase or a Tryptophan 7-halogenase.

58. The method of claim 57, wherein the Tryptophan 2-halogenase has at least 70%, such at least 75%, such as at least 80%, such as at least 90%, such as at least 95%, such as at least 99%, such as 100% identity to the Tryptophan 2-halogenase comprised in SEQ ID NO: 168.

59. The method of claim 57, wherein the Tryptophan 5-halogenase has at least 70%, such at least 75%, such as at least 80%, such as at least 90%, such as at least 95%, such as at least 99%, such as 100% identity to the Tryptophan 5-halogenase comprised in SEQ ID NO: 170.

60. The method of claim 57, wherein the Tryptophan 6-halogenase has at least 70%, such at least 75%, such as at least 80%, such as at least 90%, such as at least 95%, such as at least 99%, such as 100% identity to the Tryptophan 6-halogenase comprised in SEQ ID NO: 172.

61. The method of claim 57, wherein the Tryptophan 7-halogenase has at least 70%, such at least 75%, such as at least 80%, such as at least 90%, such as at least 95%, such as at least 99%, such as 100% identity to the Tryptophan 7-halogenase comprised in SEQ ID NO: 174.

62. The method of claim 22, wherein the P450 enzyme has at least 70%, such at least 75%, such as at least 80%, such as at least 90%, such as at least 95%, such as at least 99%, such as 100% identity to the P450 enzymes comprised in anyone of SEQ ID NO: 88, 90, 92, 94, 96, 100 and/or 178 and optionally further comprises contacting the P450 Enzymes with a P450 reductase (CPR).

63. The method of claim 62, wherein the P450 enzyme has at least 70%, such at least 75%, such as at least 80%, such as at least 90%, such as at least 95%, such as at least 99%, such as 100% identity to the P450 enzyme comprised in SEQ ID NO:96 (OsT5H) and optionally the P450 reductase has at least 70%, such at least 75%, such as at least 80%, such as at least 90%, such as at least 95%, such as at least 99%, such as 100% identity to the P450 reductase comprised in SEQ ID NO: 112 (FoCPR).

64. The method of claim 22, wherein the flavin monooxygenase has at least 70%, such at least 75%, such as at least 80%, such as at least 90%, such as at least 95%, such as at least 99%, such as 100% identity to the flavin monooxygenase comprised in SEQ ID NO: 98

65. The method of claim 22, wherein the lyase has at least 70%, such at least 75%, such as at least 80%, such as at least 90%, such as at least 95%, such as at least 99%, such as 100% identity to the lyase comprised in anyone of SEQ ID NO: 52 or 176

66. The method of claims 42 to 61, wherein the sequence identity is at least 90%, such as at least 95%, such as at least 99%, such as 100%.

67. The method of claim 66, wherein the sequence identity is at least 99%, such as 100%.

68. The method of claim 22, wherein the tryptamine derivative (I) is a hydroxytryptamine β-O-glycoside, such as a hydroxytryptamine β-O-glucoside.

69. The method of claim 68, wherein the hydroxytryptamine β-O-glycoside is selected from 4-hydroxytryptamine-β-O-glycoside, Psilocin-β-O-glycoside, Norpsilocin-β-O-glycoside, 4-hydroxy-N,N,N-trimethyltryptamine-β-O-glycoside, Serotonin-β-O-glycoside, Bufotenine-β-O-glycoside, Norbufotenine-β-O-glycoside, 5-hydroxy-N,N,N-trimethyltryptamine-β-O-glycoside, N-acetylserotonin-β-O-glycoside, Noribogaine-β-O-glycoside, 7-OH-mitragynine-β-O-glycoside, 4-HO-DET-β-O-glycoside, 4-HO-DiPT-β-O-glycoside, 4-HO-MET-β-O-glycoside, 4-HO-MiPT-β-O-glycoside, 4-HO-McPT-β-O-glycoside, 4-HO-DPT-β-O-glycoside, 4-HO-DSBT-β-O-glycoside, Harmalol-β-O-glycoside.

70. The method of any preceding claim, further comprising one or more steps selected from:
a) converting an indole or indole derivative into tryptophan or a tryptophan derivative; and
b) converting tryptophan or tryptophan derivative into tryptamine or tryptamine derivative.

71. The method of claim 70 wherein the steps are performed in vitro.

72. The method of claim 70, wherein the conversion of the indole or indole derivative into the tryptophan or tryptophan derivative comprises contacting the indole or indole derivative with a tryptophan synthase enzyme, optionally a tryptophan synthase which has at least 70%, such at least 75%, such as at least 80%, such as at least 90%, such as at least 95%, such as at least 99%, such as 100% identity to the tryptophan synthase comprised in SEQ ID NO: 60, 62, 64, 66, 68, 180, 182 and/or 256.

73. The method of claim 72, wherein the tryptophan synthase has at least 70%, such at least 75%, such as at least 80%, such as at least 90%, such as at least 95%, such as at least 99%, such as 100% identity to the tryptophan synthase comprised in SEQ ID NO: 256.

74. The method of claim 70 or 72, wherein the conversion of the tryptophan or tryptophan derivative into the tryptamine or tryptamine derivative comprises contacting the tryptophan or tryptophan derivative with a tryptophan decarboxylase enzyme, optionally a tryptophan decarboxylase which has at least 70%, such at least 75%, such as at least 80%, such as at least 90%, such as at least 95%, such as at least 99%, such as 100% identity to the tryptophan decarboxylase comprised in SEQ ID NO: 26, 70, 72, 74,76 and/or 78.

75. The method of claim 70 to 74, wherein the conversion of the indole or indole derivative into the tryptophan or tryptophan derivative comprises contacting the indole or indole derivative with a tryptophan synthase enzyme which has at least 70%, such at least 75%, such as at least 80%, such as at least 90%, such as at least 95%, such as at least 99%, such as 100% identity to the tryptophan synthase comprised in SEQ ID NO: 180 and/or 256 in the presence of a tryptophan decarboxylase which has at least 70%, such at least 75%, such as at least 80%, such as at least 90%, such as at least 95%, such as at least 99%, such as 100% identity to the tryptophan decarboxylase comprised in SEQ ID NO: 72 and/or 78.

76. The method of claim 69 to 75, wherein the indole acceptor is serotonin and the tryptamine derivative (I) is a derivative of serotonin, optionally Melatonin, Normelatonin or hydroxycinnamoylserotonin derivatives such as 4-coumaroylserotonin, and the one or more enzymes substituting one or more H, OH and/or COOH in the indole acceptor with one or more substituents of the substituent donor are selected from
a) an acetyl transferase which has at least 70% to the identity to the acetyl transferase comprised in SEQ ID NO: 142
b) an O-methyl transferase which has at least 70% to the identity to the O-methyl transferase comprised in SEQ ID NO: 118; and/or
c) a N-hydroxycinnamoyl transferase which has at least 70% to the identity to the N-hydroxycinnamoyl transferase comprised in SEQ ID NO: 162.

77. The method of claim 70, further comprising one or more further steps of
a) Glycosylation;
b) Methylation;
c) Hydroxylation;
d) Condensation;
e) Nitration;
f) Oxidation;
g) Lyase deamidation; or
h) Dephosphorylation

78. The method of claim 77, wherein the hydroxylation step comprises contacting the indole or indole derivative or tryptophan or tryptophan derivative with a hydroxylase, optionally a hydroxylase which has at least 70%, such at least 75%, such as at least 80%, such as at least 90%, such as at least 95%, such as at least 99%, such as 100% identity to the hydroxylase comprised in anyone of SEQ ID NO: 88, 90, 92, 94, 96, 98, and/or 100, optionally in the presence of a Cytochrome P450 reductase (CRP) which has at least 70%, such at least 75%, such as at least 80%, such as at least 90%, such as at least 95%, such as at least 99%, such as 100% identity to the CPR comprised in anyone of SEQ ID NO: 102, 104, 106, 108, 110 and/or 112.

79. The method of claim 77, wherein the lyase deamidation step comprises contacting the indole or indole derivative or tryptophan or tryptophan derivative with a lyase, optionally a lyase, which has at least 70%, such at least 75%, such as at least 80%, such as at least 90%, such as at least 95%, such as at least 99%, such as 100% identity to the lyase comprised in anyone SEQ ID NO: 52 and/or 176.

80. The method of any preceding claim comprising in vitro enzymatic substitution steps and/or optionally in vivo enzymatic substitution steps.

81. The method of claim 80 comprising expressing a glycosyl transferase in E. coli and performing in vitro glycosylation of the indole acceptor.

82. A tryptamine derivative of formula (I): [chemical structure]
wherein at least one of R2, R4 to R9, α and β is a glycosyl group.

83. The tryptamine derivative of claim 80, selected from the group of 4-hydroxytryptamine-β-O-glycoside, Psilocin-β-O-glycoside, Norpsilocin-β-O-glycoside, 4-hydroxy-N,N,N-trimethyltryptamine-β-O-glycoside, Serotonin-β-O-glycoside, Bufotenine-β-O-glycoside, Norbufotenine-β-O-glycoside, 5-hydroxy-N,N,N-trimethyltryptamine-β-O-glycoside, N-acetylserotonin-β-O-glycoside, Noribogaine-β-O-glycoside, 7-OH-mitragynine-β-O-glycoside, 4-HO-DET-β-O-glycoside, 4-HO-DiPT-β-O-glycoside, 4-HO-MET-β-O-glycoside, 4-HO-MiPT-β-O-glycoside, 4-HO-McPT-β-O-glycoside, 4-HO-DPT-β-O-glycoside, 4-HO-DSBT-β-0-glycoside, and wherein the glycoside of Serotonin-β-O-glycoside, Bufotenine-β-O-glycoside, Norbufotenine-β-O-glycoside or 5-hydroxy-N,N,N-trimethyltryptamine-β-O-glycoside is not a glucoside.

84. A microbial host cell genetically modified to perform the method of claims 1 to 79 and produce the tryptamine derivative, wherein the host cell expresses one or more heterologous genes encoding the one or more enzymes, which in the presence of the indole acceptor and one or more substituent donors, transfers one or more substituents to the one or more H, OH and/or COOH of the indole acceptor.

85. The host cell of claim 82, expressing one or more genes selected from:
a) genes encoding a UGT said genes which are at least 70% identical to the UGT encoding polynucleotide comprised in anyone of SEQ ID NO: 79, 81, 83, 85, 187, 189, 191, 193, 195, 197, 199, 201, 203, 205, 207, 209, 211, 213, 215, 217, 219, 221, 223, 225, 227, 229, 231, 233, 235, 237, 239, 241, 243, 245, 247, 249, and/or 251 or genomic DNA thereof;
b) genes encoding an O-methyltransferase said genes which are at least 70% identical to the O-methyltransferase encoding polynucleotide comprised in anyone of SEQ ID NO: 113, 115, 117, and/or 119 or genomic DNA thereof;
c) genes encoding an N-methyltransferase said genes which are at least 70% identical to the N-methyltransferase encoding polynucleotide comprised in anyone of SEQ ID NO: 121, 123, 125, 127, 129, 131, 133, 135, and/or 137 or genomic DNA thereof;
d) genes encoding a C-methyltransferase said genes which are at least 70% identical to the C-methyltransferase encoding polynucleotide comprised in SEQ ID NO: 139 or genomic DNA thereof;
e) genes encoding a strictosidine synthase said genes which are at least 70% identical to the strictosidine synthase encoding polynucleotide comprised in anyone of SEQ ID NO: 143, 145, 147, and/or 149 or genomic DNA thereof;
f) genes encoding a 1-acetyl-β-carboline synthase said genes which are at least 70% identical to the 1-acetyl-β-carboline synthase encoding polynucleotide comprised in anyone of SEQ ID NO: 151, and/or 153 or genomic DNA thereof;
g) genes encoding a 1-acetyl-β-carboline synthase said genes which are at least 70% identical to the aralkylamine N-acetyltransferase encoding polynucleotide comprised in SEQ ID NO: 141 or genomic DNA thereof;
h) genes encoding a 4-Hydroxytryptamine kinase and/or a 7-hydroxytryptamine kinase said genes which are at least 70% identical to the 4-Hydroxytryptamine kinase and/or a 7-hydroxytryptamine kinase encoding polynucleotide comprised in anyone of SEQ ID NO: 155, 157, and/or 159 or genomic DNA thereof;
i) genes encoding an N-hydroxycinnamoyltransferase said genes which are at least 70% identical to the N-hydroxycinnamoyltransferase encoding polynucleotide comprised in SEQ ID NO: 161 or genomic DNA thereof;
j) genes encoding a psilocybin phosphatase said genes which are at least 70% identical to the psilocybin phosphatase encoding polynucleotide comprised in SEQ ID NO: 163 or genomic DNA thereof;
k) genes encoding a psilocin laccase said genes which are at least 70% identical to the psilocin laccase encoding polynucleotide comprised in SEQ ID NO: 165 or genomic DNA thereof;
l) genes encoding a Tryptophan 2-halogenase said genes which are at least 70% identical to the Tryptophan 2-halogenase encoding polynucleotide comprised in SEQ ID NO: 167 or genomic DNA thereof;
m) genes encoding a Tryptophan 5-halogenase said genes which are at least 70% identical to the Tryptophan 5-halogenase encoding polynucleotide comprised in SEQ ID NO: 169 or genomic DNA thereof;
n) genes encoding a Tryptophan 6-halogenase said genes which are at least 70% identical to the Tryptophan 6-halogenase encoding polynucleotide comprised in SEQ ID NO: 171 or genomic DNA thereof;
o) genes encoding a Tryptophan 7-halogenase said genes which are at least 70% identical to the Tryptophan 7-halogenase encoding polynucleotide comprised in SEQ ID NO: 173 or genomic DNA thereof;
p) genes encoding a P450 enzyme said genes which are at least 70% identical to the P450 enzyme encoding polynucleotide comprised in anyone of SEQ ID NO: 87, 89, 91, 93, 95, 99, and/or 177 or genomic DNA thereof;
q) genes encoding a P450 reductase said genes which are at least 70% identical to the P450 reductase (CPR) encoding polynucleotide comprised in anyone of SEQ ID NO: 101, 103, 105, 107, 109, and/or 111 or genomic DNA thereof;
r) genes encoding a flavin monooxygenase said genes which are at least 70% identical to the flavin monooxygenase encoding polynucleotide comprised in SEQ ID NO: 97 or genomic DNA thereof; and/or
s) genes encoding a lyase said genes which are at least 70% identical to the lyase encoding polynucleotide comprised in anyone of SEQ ID NO: 51 and/or 175 or genomic DNA thereof.

86. The host cell of claim 82 to 83, further comprising an operative biosynthetic pathway producing the indole acceptor, wherein the host cell expresses one or more pathway genes encoding polypeptides selected from:
a) one or more enzymes converting glucose to fructose-6-phosphate;
b) a fructose-6-phosphate phosphoketolase converting fructose-6-phosphate to Erythrose-4-phosphate and acetyl phosphate;
c) a Phosphotransacetylase converting Acetyl phosphate to Acetyl-CoA;
d) one or more enzymes converting Fructose-6-phosphate to Phosphoenolpyruvate;
e) a 3-deoxy-D-arabino-heptulosonate 7-phosphate synthase (DAHP synthase) converting Phosphoenolpyruvate and Erythrose-4-phosphate to 3-deoxy-D-arabino-heptulosonate-7-phosphate (DAHP);
f) one or more enzymes converting 3-deoxy-D-arabino-heptulosonate-7-phosphate to 5-enolpyruvoyl-shikimate 3-phosphate;
g) a Shikimate kinase converting Shikimate to Shikimate-3-phosphate;
h) a Chorismate synthase converting 5-enolpyruvoyl-shikimate 3-phosphate to Chorismate;
i) a Anthranilate synthase converting Chorismate to Anthranilate;
j) a Ribose-phosphate pyrophosphokinase converting Ribose-5-phosphate to Phospho-alpha-D-ribosyl-1-pyrophosphate;
k) a Anthranilate phosphoribosyl transferase converting Anthranilate and Phospho-alpha-D-ribosyl-1-pyrophosphate to N-(5-phosphoribosyl)-anthranilate;
l) a N-(5′-phosphoribosyl)-anthranilate isomerase converting N-(5-phosphoribosyl)-anthranilate to 1-(o-carboxyphenylamino)-1′-deoxyribulose 5′-phosphate;
m) a Indole-3-glycerol phosphate synthase converting 1-(o-carboxyphenylamino)-1′-deoxyribulose 5′-phosphate to (1S,2R)-1-C-(indol-3-yl)-glycerol 3-phosphate;
n) a Tryptophan synthase converting (1S,2R)-1-C-(indol-3-yl) glycerol 3-phosphate and Serine to L-Tryptophan;
o) a Tryptophan decarboxylase converting L-Tryptophan to Tryptamine;
p) a Chorismate mutase converting Chorismate to Prephenate;
q) a Prephenate dehydrogenase converting Prephenate to Phenylpyruvate;
r) an Aromatic aminotransferase converting Phenylpyruvate to phenylalanine;
s) a Phenylalanine ammonium lyase converting Phenylalanine to cinnamate;
t) a Cinnamate 4-hydroxylase converting Cinnamate to coumarate;
u) a cytochrome b5 assisting Cytochrome P450 reductases reducing hydroxylase enzymes;
v) a Cytochrome P450 reductase reducing cytochrome P450 enzymes;
w) a 4-Coumoryl-CoA ligase converting Coumarate to 4-coumoryl CoA;
x) a Tryptophanase converting tryptophan or a derivative thereof into indole or a derivative thereof;
y) a Tryptophan synthase converting Indole or a derivative thereof and Serine or a derivative thereof into Tryptophan or a derivative thereof;
z) a Tryptophan decarboxylase or a non-canonical aromatic amino acid decarboxylase converting Tryptophan or a derivative thereof into Tryptamine or a derivative thereof;
aa) a Tryptamine 5-hydroxylase converting tryptamine to serotonin;
bb) a Tryptamine 4-hydroxylase converting tryptamine to 4-hydroxytryptamine.
cc) 4-hydroxytryptamine kinase converting 4-hydroxytryptamine to Norbaeocystin; and/or
dd) Psilocybin synthase converting Norbaeocystin to Psilocybin.

87. The host cell of claim 84, wherein the corresponding:
a) fructose-6-phosphate phosphoketolase has at least 70% identity to the fructose-6-phosphate phosphoketolase comprised in SEQ ID NO: 2;
b) Phosphotransacetylase has at least 70% identity to the Phosphotransacetylase comprised in SEQ ID NO: 4;
c) 3-deoxy-D-arabino-heptulosonate 7-phosphate synthase has at least 70% identity to the 3-deoxy-D-arabino-heptulosonate 7-phosphate synthase comprised in SEQ ID NO: 6;
d) Enzyme converting 3-deoxy-D-arabino-heptulosonate-7-phosphate to 5-enolpyruvoyl-shikimate 3-phosphate has at least 70% identity to the Enzyme comprised in SEQ ID NO: 8;
e) Shikimate kinase has at least 70% identity to the Shikimate kinase comprised in SEQ ID NO: 10;
f) Chorismate synthase has at least 70% identity to the Chorismate synthase comprised in SEQ ID NO: 12;
g) Anthranilate synthase has at least 70% identity to the Anthranilate synthase comprised in SEQ ID NO: 14;
h) Ribose-phosphate pyrophosphokinase has at least 70% identity to the Ribose-phosphate pyrophosphokinase comprised in SEQ ID NO: 16;
i) Anthranilate phosphoribosyl transferase has at least 70% identity to the Anthranilate phosphoribosyl transferase comprised in SEQ ID NO: 18;
j) N-(5′-phosphoribosyl)-anthranilate isomerase has at least 70% identity to the N-(5′-phosphoribosyl)-anthranilate isomerase comprised in SEQ ID NO: 20;
k) Indole-3-glycerol phosphate synthase has at least 70% identity to the Indole-3-glycerol phosphate synthase comprised in SEQ ID NO: 22;
l) Tryptophan synthase has at least 70% identity to the Tryptophan synthase comprised in anyone of SEQ ID NO: 24, 60, 62, 64, 66, 68, 180 and/or 182;
m) Tryptophan decarboxylase or a non-canonical aromatic amino acid decarboxylase has at least 70% identity to the Tryptophan decarboxylase or a non-canonical aromatic amino acid decarboxylase comprised in anyone of SEQ ID NO: 26, 70, 72, 74, 76, and/or 78;
n) Chorismate mutase has at least 70% identity to the Chorismate mutase comprised in SEQ ID NO: 46;
o) Prephenate dehydrogenase has at least 70% identity to the Prephenate dehydrogenase comprised in SEQ ID NO: 48;
p) Aromatic aminotransferase has at least 70% identity to the Aromatic aminotransferase comprised in SEQ ID NO: 50;
q) Phenylalanine ammonium lyase has at least 70% identity to the Phenylalanine ammonium lyase comprised in SEQ ID NO: 52;
r) Cinnamate 4-hydroxylase has at least 70% identity to the Cinnamate 4-hydroxylase comprised in SEQ ID NO: 54;
s) cytochrome b5 has at least 70% identity to the cytochrome b5 comprised in SEQ ID NO: 254;
t) Cytochrome P450 reductase has at least 70% identity to the Cytochrome P450 reductase comprised in SEQ ID NO: 56, 102, 104, 106, 108, 110 and/or 112;
u) 4-Coumoryl-CoA ligase has at least 70% identity to the 4-Coumoryl-CoA ligase comprised in SEQ ID NO: 58.
v) Tryptamine 5-hydroxylase has at least 70% identity to the 5-hydroxylase comprised in SEQ ID NO: 96;
w) Typtamine 4-hydroxylase has at least 70% identity to the Tryptamine 4-hydroxylase comprised in SEQ ID NO 94:
x) 4-hydroxytryptamine kinase has at least 70% identity to the 4-hydroxytryptamine kinase comprised in SEQ ID NO: 160; and/or
y) Psilocybin synthase has at least 70% identity to the Psilocybin synthase comprised in SEQ ID NO: 128.

88. The host cell of claim 84 or 85, wherein the one or more expressed genes are selected from:
a) genes encoding a fructose-6-phosphate phosphoketolase said genes being at least 70% identical to the fructose-6-phosphate phosphoketolase encoding polynucleotide comprised in SEQ ID NO: 1 or genomic DNA thereof;
b) genes encoding a Phosphotransacetylase said genes being at least 70% identical to the Phosphotransacetylase encoding polynucleotide comprised in SEQ ID NO: 3 or genomic DNA thereof;
c) genes encoding a 3-deoxy-D-arabino-heptulosonate 7-phosphate synthase said genes being at least 70% identical to the 3-deoxy-D-arabino-heptulosonate 7-phosphate synthase encoding polynucleotide comprised in SEQ ID NO: 5 or genomic DNA thereof;
d) genes encoding an enzyme converting 3-deoxy-D-arabino-heptulosonate-7-phosphate to 5-enolpyruvoyl-shikimate 3-phosphate said genes being at least 70% identical to the polynucleotide encoding the enzyme converting 3-deoxy-D-arabino-heptulosonate-7-phosphate to 5-enolpyruvoyl-shikimate 3-phosphate comprised in SEQ ID NO: 7 or genomic DNA thereof;
e) genes encoding a XX said genes being at least 70% identical to the Shikimate kinase encoding polynucleotide comprised in SEQ ID NO: 9 or genomic DNA thereof;
f) genes encoding a Shikimate kinase said genes being at least 70% identical to the Chorismate synthase encoding polynucleotide comprised in SEQ ID NO: 11 or genomic DNA thereof;
g) genes encoding a Anthranilate synthase said genes being at least 70% identical to the Anthranilate synthase encoding polynucleotide comprised in SEQ ID NO: 13 or genomic DNA thereof;
h) genes encoding a Ribose-phosphate pyrophosphokinase said genes being at least 70% identical to the Ribose-phosphate pyrophosphokinase encoding polynucleotide comprised in SEQ ID NO: 15 or genomic DNA thereof;
i) genes encoding a anthranilate phosphoribosyl transferase said genes being at least 70% identical to the Anthranilate phosphoribosyl transferase encoding polynucleotide comprised in SEQ ID NO: 17 or genomic DNA thereof;
j) genes encoding a N-(5′-phosphoribosyl)-anthranilate isomerase said genes being at least 70% identical to the N-(5′-phosphoribosyl)-anthranilate isomerase encoding polynucleotide comprised in SEQ ID NO: 19 or genomic DNA thereof;
k) genes encoding a Indole-3-glycerol phosphate synthase said genes being at least 70% identical to the Indole-3-glycerol phosphate synthase encoding polynucleotide comprised in SEQ ID NO: 21 or genomic DNA thereof;
l) genes encoding a Tryptophan synthase said genes being at least 70% identical to the Tryptophan synthase encoding polynucleotide comprised in anyone of SEQ ID NO: 23, 59, 61, 63, 65, 67, 179, and/or 181 or genomic DNA thereof;
m) genes encoding a Tryptophan decarboxylase or a non-canonical aromatic amino acid decarboxylase said genes being at least 70% identical to the Tryptophan decarboxylase or a non-canonical aromatic amino acid decarboxylase encoding polynucleotide comprised in SEQ ID NO: 25, 69, 71, 73, 75, and/or 77 or genomic DNA thereof;
n) genes encoding a Chorismate mutase said genes being at least 70% identical to the Chorismate mutase encoding polynucleotide comprised in SEQ ID NO: 45 or genomic DNA thereof;
o) genes encoding a Prephenate dehydrogenase said genes being at least 70% identical to the Prephenate dehydrogenase encoding polynucleotide comprised in SEQ ID NO: 47 or genomic DNA thereof;
p) genes encoding a Aromatic aminotransferase said genes being at least 70% identical to the Aromatic aminotransferase encoding polynucleotide comprised in SEQ ID NO: 49 or genomic DNA thereof;
q) genes encoding a Phenylalanine ammonium lyase said genes being at least 70% identical to the Phenylalanine ammonium lyase encoding polynucleotide comprised in SEQ ID NO: 51 or genomic DNA thereof;
r) genes encoding a cinnamate 4-hydroxylase said genes being at least 70% identical to the Cinnamate 4-hydroxylase encoding polynucleotide comprised in SEQ ID NO: 53 or genomic DNA thereof;
s) genes encoding a cytochrome b5 said genes being at least 70% identical to the C cytochrome b5 encoding polynucleotide comprised in SEQ ID NO: 253 or genomic DNA thereof;
t) genes encoding a Cytochrome P450 reductase said genes being at least 70% identical to the Cytochrome P450 reductase encoding polynucleotide comprised in SEQ ID NO: 55, 101, 103, 105, 107, 109 and/or 111 or genomic DNA thereof;
u) genes encoding a 4-Coumoryl-CoA ligase said genes being at least 70% identical to the 4-Coumoryl-CoA ligase encoding polynucleotide comprised in SEQ ID NO: 57 or genomic DNA thereof.
v) genes encoding a Tryptamine 5-hydroxylase said genes being at least 70% identical to the Tryptamine 5-hydroxylase encoding polynucleotide comprised in SEQ ID NO: 96 or genomic DNA thereof;
w) genes encoding a Cytochrome p450 reductase said genes being at least 70% identical to the Cytochrome p450 reductase encoding polynucleotide comprised in SEQ ID NO: 111 or genomic DNA thereof.
x) genes encoding a 4-hydroxytryptamine kinase said genes being at least 70% identical to the 4-hydroxytryptamine kinase encoding polynucleotide comprised SEQ ID NO 159; and/or
y) genes encoding a psilocybin synthase said genes being at least 70% identical to the psilocybin synthase encoding polynucleotide comprised in SEQ ID NO 127.

89. The host cell of claim 86, further expressing:
a) genes encoding a Psilocybin synthase said genes which are at least 70% identical to the Psilocybin synthase encoding polynucleotide comprised in anyone of SEQ ID NO: 127 and/or 123 or genomic DNA thereof;
b) genes encoding a 4-Hydroxytryptamine kinase said genes which are at least 70% identical to the 4-Hydroxytryptamine kinase encoding polynucleotide comprised in anyone of SEQ ID NO: 159 or genomic DNA thereof;
c) genes encoding a P450 reductase said genes which are at least 70% identical to the P450 reductase (CPR) encoding polynucleotide comprised in SEQ ID NO: 105 and/or 101 or genomic DNA thereof;
d) genes encoding a P450 enzyme said genes which are at least 70% identical to the P450 enzyme encoding polynucleotide comprised in SEQ ID NO: 93 and/or 87 or genomic DNA thereof; and
e) genes encoding a Tryptophan decarboxylase said genes being at least 70% identical to the Tryptophan decarboxylase encoding polynucleotide comprised in SEQ ID NO: 77 and/or 71 or genomic DNA thereof.

90. The host cell of claims 83 or 85 to 86, wherein the sequence identity is least 90%, such as at least 95%, such as at least 99%, such as 100%.

91. The host cell of claim 88, wherein the sequence identity is at least 99%, such as 100%.

92. The host cell of claims 82 to 89, comprising at least two copies of one or more of the heterologous genes encoding the one or more enzymes, which in the presence of the indole acceptor and one or more substituent donors, transfers one or more substituents to the one or more H, OH and/or COOH of the indole acceptor, or of the pathway genes.

93. The host cell of claims 82 to 90, wherein one or more of the heterologous genes encoding the one or more enzymes, which in the presence of the indole acceptor and one or more substituent donors, transfers one or more substituents to the one or more H, OH and/or COOH of the indole acceptor, or of the pathway genes are overexpressed.

94. The cell of claims 82 to 91 further genetically modified to provide an increased amount of a substrate for at least one polypeptide of the indole acceptor pathway.

95. The host cell of claims 82 to 92, further genetically modified to exhibit increased tolerance towards one or more substrates, intermediates, or product molecules from the indole acceptor pathway.

96. The host cell claims 82 to 93, wherein the host cell is an eukaryotic, prokaryotic or archaic cell.

97. The host cell of claim 94, wherein the host cell is an eukaryote cell selected from the group consisting of mammalian, insect, plant, or fungal cells.

98. The host cell of claim 95, wherein the host cell is a fungal host cell selected from phylas consisting of Ascomycota, Basidiomycota, Neocallimastigomycota, Glomeromycota, Blastocladiomycota, Chytridiomycota, Zygomycota, Oomycota and Microsporidia.

99. The host cell of claim 96, wherein the fungal host cell is a yeast selected from the group consisting of ascosporogenous yeast (Endomycetales), basidiosporogenous yeast, and Fungi Imperfecti yeast (Blastomycetes).

100. The host cell of claim 97, wherein the yeast host cell is selected from the genera consisting of Saccharomyces, Kluveromyces, Candida, Pichia, Debaromyces, Hansenula, Yarrowia, Zygosaccharomyces, and Schizosaccharomyces.

101. The host cell of claim 98, wherein the yeast host cell is selected from the species consisting of Kluyveromyces lactis, Saccharomyces carlsbergensis, Saccharomyces cerevisiae, Saccharomyces diastaticus, Saccharomyces douglasii, Saccharomyces kluyveri, Saccharomyces norbensis, Saccharomyces oviformis, Saccharomyces boulardii and Yarrowia lipolytica.

102. The host cell of claim 96, wherein the fungal host cell is filamentous fungus.

103. The host cell of claim 100, wherein the filamentous fungal host cell is selected from the phylas consisting of Ascomycota, Eumycota and Oomycota.

104. The host cell of claim 101, wherein the filamentous fungal host cell is selected from the genera consisting of Acremonium, Aspergillus, Aureobasidium, Bjerkandera, Ceriporiopsis, Chrysosporium, Coprinus, Corio/us, Cryptococcus, Filibasidium, Fusarium, Humicola, Magnaporthe, Mucor, Myceliophthora, Neocallimastix, Neurospora, Paecilomyces, Penicillium, Phanerochaete, Phlebia, Piromyces, Pleurotus, Schizophyllum, Talaromyces, Thermoascus, Thielavia, Tolypocladium, Trametes, and Trichoderma.

105. The host cell of claim 102, wherein the filamentous fungal host cell is selected from the species consisting of Aspergillus awamori, Aspergillus foetidus, Aspergillus fumigatus, Aspergillus japonicus, Aspergillus nidulans, Aspergillus niger, Aspergillus oryzae, Bjerkandera adusta, Ceriporiopsis aneirina, Ceriporiopsis caregiea, Ceriporiopsis gilvescens, Ceriporiopsis pannocinta, Ceriporiopsis rivulosa, Ceriporiopsis subrufa, Ceriporiopsis subvermispora, Chrysosporiuminops, Chrysosporium keratinophilum, Chrysosporium lucknowense, Chrysosporium merdarium, Chrysosporium pannicola, Chrysosporium queenslandicum, Chrysosporium tropicum, Chrysosporium zonatum, Coprinus cinereus, Coriolus hirsutus, Fusarium bactridioides, Fusarium cerealis, Fusarium crookwellense, Fusarium culmorum, Fusarium graminearum, Fusarium graminum, Fusarium heterosporum, Fusarium negundi, Fusarium oxysporum, Fusarium reticulatum, Fusarium roseum, Fusarium sambucinum, Fusarium sarcochroum, Fusarium sporotrichioides, Fusarium sulphureum, Fusarium torulosum, Fusarium trichothecioides, Fusarium venenatum, Humicola insolens, Humicola lanuginosa, Mucor miehei, Myceliophthora thermophila, Neurospora crassa, Penicillium purpurogenum, Phanerochaete chrysosporium, Phlebia radiata, Pleurotus eryngii, Thielavia terrestris, Trametes villosa, Trametes versicolor, Trichoderma harzianum, Trichoderma koningii, Trichoderma longibrachiatum, Trichoderma reesei, and Trichoderma viride.

106. The host cell of claim 94, wherein the host cell is a prokaryotic cell.

107. The host cell of claim 104, wherein the prokaryotic cell is E. coli.

108. The host cell of claim 94, wherein the host cell is an archaic cell.

109. The host cell of claim 106, wherein the archaic cell is an algae.

110. The host cell of claim 82 to 93, wherein one or more native genes are attenuated, disrupted and/or deleted.

111. The host cell of claim 108 wherein the attenuated, disrupted and/or deleted gene is a phosphatase shunting psilocybin to psilocin.

112. The host cell of claim 108 wherein the host cell is a yeast strain modified by attenuating, disrupting and/or deleting one or more native genes selected from:
a) The pyruvate kinase gene comprised in anyone of SEQ ID NO: 27 or any of its paralogs or orthologs having at least 70% identity to SEQ ID NO: 27;
b) The phosphofructokinase gene comprised in anyone of SEQ ID NO: 29 or 31 or any of its paralogs or orthologs having at least 70% identity to anyone of SEQ ID NO: 29 or 31;
c) The transporters gene comprised in SEQ ID NO: 33 or any of its paralogs or orthologs having at least 70% identity to SEQ ID NO: 33;
d) The DL-glycerol-3-phosphate phosphatase gene comprised in SEQ ID NO: 34 or any of its paralogs or orthologs having at least 70% identity to SEQ ID NO: 34;
e) The tryptophan 2,3-dioxygenase gene comprised in SEQ ID NO: 35 or any of its paralogs or orthologs having at least 70% identity to SEQ ID NO: 35;
f) The cystathionine beta-synthase gene comprised in SEQ ID NO: 36 or any of its paralogs or orthologs having at least 70% identity to SEQ ID NO: 36;
g) The phenylpyruvate decarboxylase gene comprised in SEQ ID NO: 37 or any of its paralogs or orthologs having at least 70% identity to SEQ ID NO: 37;
h) The pyruvate decarboxylase gene comprised in SEQ ID NO: 38 or any of its paralogs or orthologs having at least 70% identity to SEQ ID NO: 38;
i) The histone variant H2AZ gene comprised in SEQ ID NO: 39 or any of its paralogs or orthologs having at least 70% identity to SEQ ID NO: 39;
j) The phosphatase gene comprised in SEQ ID NO: 40 or any of its paralogs or orthologs having at least 70% identity to SEQ ID NO: 40;
k) The repressible acid phosphatase gene comprised in anyone of SEQ ID NO: 41, 42, or 43 or any of its paralogs or orthologs having at least 70% identity to anyone of SEQ ID NO: 41, 42, or 43;
l) The constitutively expressed acid phosphatase gene comprised in SEQ ID NO: 44 or any of its paralogs or orthologs having at least 70% identity to SEQ ID NO: 44;
m) The sterol reductase gene comprised in SEQ ID NO: 183 or any of its paralogs or orthologs having at least 70% identity to SEQ ID NO: 183; and/or
n) The S-adenosylmethionine decarboxylase gene comprised in SEQ ID NO: 184 or any of its paralogs or orthologs having at least 70% identity to SEQ ID NO: 184.

113. The host cell of claims 108 to 110, wherein the host cell is a yeast strain modified by overexpressing one or more native genes selected from the NADH kinase gene comprised in SEQ ID NO: 185 or any of its paralogs or orthologs having at least 70% identity to SEQ ID NO: 185.

114. A cell culture, comprising host cell of claims 82 to 110 and a growth medium.

115. The method of claims 1 to 79 further comprising:
a) culturing the cell culture of claim 112 at conditions allowing the host cell to produce the tryptamine derivative (I); and
b) optionally recovering and/or isolating the tryptamine derivative (I).

116. The method of claim 113, further comprising one or more elements selected from:
a) culturing the cell culture in a nutrient growth medium;
b) culturing the cell culture under aerobic or anaerobic conditions
c) culturing the cell culture under agitation;
d) culturing the cell culture at a temperature of between 25 to 50° C.;
e) culturing the cell culture at a pH of between 3-9;
f) culturing the cell culture for between 10 hours to 30 days; and
g) culturing the cell culture under fed-batch, repeated fed-batch, continuous, or semi-continuous conditions.

117. The method of claims 113 to 114, further comprising feeding one or more exogenous indole acceptors or precursors thereof and/or substituent donors to the cell culture.

118. The method of claims 113 to 115, wherein the recovering and/or isolation step comprises separating a liquid phase of host cell or cell culture from a solid phase of host cell or cell culture to obtain a supernatant comprising the tryptamine derivative (I) by one or more steps selected from:
a) disrupting the host cell to release intracellular tryptamine derivative (I) into the supernatant;
b) separating the supernatant from the solid phase of the host cell, such as by filtration or gravity separation;
c) contacting the supernatant with one or more adsorbent resins in order to obtain at least a portion of the produced tryptamine derivative (I);
d) contacting the supernatant with one or more ion exchange or reversed-phase chromatography columns in order to obtain at least a portion of the tryptamine derivative (I);
e) extracting the tryptamine derivative (I); and
f) precipitating the tryptamine derivative (I) by crystallization or evaporating the solvent of the liquid phase; and optionally isolating the tryptamine derivative (I) by filtration or gravity separation;
thereby recovering and/or isolating the tryptamine derivative (I).

119. A fermentation liquid comprising the tryptamine derivative (I) comprised in the cell culture of claim 112.

120. The fermentation liquid of claim 117, wherein at least 50%, such as at least 75%, such as at least 95%, such as at least 99% of the host cells are disrupted.

121. The fermentation liquid of claim 117 to 118, wherein at least 50%, such as at least 75%, such as at least 95%, such as at least 99% of solid cellular material has separated from the liquid.

122. The fermentation liquid of claim 117 to 119, further comprising one or more compounds selected from:
a) precursors or products of the operative biosynthetic pathway producing the tryptamine derivative (I);
b) supplemental nutrients comprising trace metals, vitamins, salts, yeast nitrogen base, YNB, and/or amino acids; and
wherein the concentration of the tryptamine derivative (I) is at least 1 mg/I liquid.

123. A composition comprising the fermentation liquid of claims 117 to 120 and/or the tryptamine derivative (I) of claims 80 to 81 and one or more agents, additives and/or excipients.

124. The composition of claim 121, wherein the fermentation liquid and/or the tryptamine derivative (I) have been processed into in a dry solid form, optionally in form of a powder, tablet, capsule, hard chewable and or soft lozenge or a gum.

125. The composition of claim 121, wherein the composition is in a liquid form, optionally in a stabilized liquid form.

126. A genetically modified microbial host cell producing a serotonin indole acceptor expressing
a) one or more genes encoding polypeptides selected from
i. one or more enzymes converting glucose to fructose-6-phosphate;
ii. a fructose-6-phosphate phosphoketolase converting fructose-6-phosphate to Erythrose-4-phosphate and acetyl phosphate;
iii. a Phosphotransacetylase converting Acetyl phosphate to Acetyl-CoA;
iv. one or more enzymes converting Fructose-6-phosphate to Phosphoenolpyruvate;
v. a 3-deoxy-D-arabino-heptulosonate 7-phosphate synthase (DAHP synthase) converting Phosphoenolpyruvate and Erythrose-4-phosphate to 3-deoxy-D-arabino-heptulosonate-7-phosphate (DAHP);
vi. one or more enzymes converting 3-deoxy-D-arabino-heptulosonate-7-phosphate to 5-enolpyruvoyl-shikimate 3-phosphate;
vii. a Shikimate kinase converting Shikimate to Shikimate-3-phosphate;
viii. a Chorismate synthase converting 5-enolpyruvoyl-shikimate 3-phosphate to Chorismate;
ix. a Anthranilate synthase converting Chorismate to Anthranilate;
x. a Ribose-phosphate pyrophosphokinase converting Ribose-5-phosphate to Phospho-alpha-D-ribosyl-1-pyrophosphate;
xi. a Anthranilate phosphoribosyl transferase converting Anthranilate and Phospho-alpha-D-ribosyl-1-pyrophosphate to N-(5-phosphoribosyl)-anthranilate;
xii. a N-(5′-phosphoribosyl)-anthranilate isomerase converting N-(5-phosphoribosyl)-anthranilate to 1-(o-carboxyphenylamino)-1′-deoxyribulose 5′-phosphate;
xiii. an Indole-3-glycerol phosphate synthase converting 1-(o-carboxyphenylamino)-1′-deoxyribulose 5′-phosphate to (1S,2R)-1-C-(indol-3-yl)-glycerol 3-phosphate;
xiv. a Tryptophan synthase converting (1S,2R)-1-C-(indol-3-yl) glycerol 3-phosphate and Serine to L-Tryptophan; and/or
xv. a Tryptophan decarboxylase converting L-Tryptophan to Tryptamine; and
b) a heterologous Tryptamine 5-hydroxylase converting tryptamine to serotonin; and
c) a heterologous Cytochrome p450 reductase assisting the conversion of tryptamine to serotonin by a Tryptamine 5-hydroxylase.

127. The host cell of claim 124, wherein the corresponding:
a) fructose-6-phosphate phosphoketolase has at least 70% identity to the fructose-6-phosphate phosphoketolase comprised in SEQ ID NO: 2;
b) Phosphotransacetylase has at least 70% identity to the Phosphotransacetylase comprised in SEQ ID NO: 4;
c) 3-deoxy-D-arabino-heptulosonate 7-phosphate synthase has at least 70% identity to the 3-deoxy-D-arabino-heptulosonate 7-phosphate synthase comprised in SEQ ID NO: 6;
d) Enzyme converting 3-deoxy-D-arabino-heptulosonate-7-phosphate to 5-enolpyruvoyl-shikimate 3-phosphate has at least 70% identity to the Enzyme comprised in SEQ ID NO: 8;
e) Shikimate kinase has at least 70% identity to the Shikimate kinase comprised in SEQ ID NO: 10;
f) Chorismate synthase has at least 70% identity to the Chorismate synthase comprised in SEQ ID NO: 12;
g) Anthranilate synthase has at least 70% identity to the Anthranilate synthase comprised in SEQ ID NO: 14;
h) Ribose-phosphate pyrophosphokinase has at least 70% identity to the Ribose-phosphate pyrophosphokinase comprised in SEQ ID NO: 16;
i) Anthranilate phosphoribosyl transferase has at least 70% identity to the Anthranilate phosphoribosyl transferase comprised in SEQ ID NO: 18;
j) N-(5′-phosphoribosyl)-anthranilate isomerase has at least 70% identity to the N-(5′-phosphoribosyl)-anthranilate isomerase comprised in SEQ ID NO: 20;
k) Indole-3-glycerol phosphate synthase has at least 70% identity to the Indole-3-glycerol phosphate synthase comprised in SEQ ID NO: 22;
l) Tryptophan synthase has at least 70% identity to the Tryptophan synthase comprised in anyone of SEQ ID NO: 24, 60, 62, 64, 66, 68, 180 and/or 182;
m) Tryptophan decarboxylase or a non-canonical aromatic amino acid decarboxylase has at least 70% identity to the Tryptophan decarboxylase or a non-canonical aromatic amino acid decarboxylase comprised in anyone of SEQ ID NO: 26, 70, 72, 74, 76, and/or 78;
n) Tryptamine 5-hydroxylase has at least 70% identity to the Tryptamine 5-hydroxylase comprised in SEQ ID NO: 96 (OsT5H); and
o) Cytochrome p450 reductase has at least 70% identity to the Cytochrome p450 reductase comprised in SEQ ID NO: 112 (FoCPR).

128. The host cell of claim 125, wherein the one or more expressed genes are selected from:
a) genes encoding a fructose-6-phosphate phosphoketolase said genes being at least 70% identical to the fructose-6-phosphate phosphoketolase encoding polynucleotide comprised in SEQ ID NO: 1 or genomic DNA thereof;
b) genes encoding a Phosphotransacetylase said genes being at least 70% identical to the Phosphotransacetylase encoding polynucleotide comprised in SEQ ID NO: 3 or genomic DNA thereof;
c) genes encoding a 3-deoxy-D-arabino-heptulosonate 7-phosphate synthase said genes being at least 70% identical to the 3-deoxy-D-arabino-heptulosonate 7-phosphate synthase encoding polynucleotide comprised in SEQ ID NO: 5 or genomic DNA thereof;
d) genes encoding an enzyme converting 3-deoxy-D-arabino-heptulosonate-7-phosphate to 5-enolpyruvoyl-shikimate 3-phosphate said genes being at least 70% identical to the polynucleotide encoding the enzyme converting 3-deoxy-D-arabino-heptulosonate-7-phosphate to 5-enolpyruvoyl-shikimate 3-phosphate comprised in SEQ ID NO: 7 or genomic DNA thereof;
e) genes encoding a XX said genes being at least 70% identical to the Shikimate kinase encoding polynucleotide comprised in SEQ ID NO: 9 or genomic DNA thereof;
f) genes encoding a Shikimate kinase said genes being at least 70% identical to the Chorismate synthase encoding polynucleotide comprised in SEQ ID NO: 11 or genomic DNA thereof;
g) genes encoding a Anthranilate synthase said genes being at least 70% identical to the Anthranilate synthase encoding polynucleotide comprised in SEQ ID NO: 13 or genomic DNA thereof;
h) genes encoding a Ribose-phosphate pyrophosphokinase said genes being at least 70% identical to the Ribose-phosphate pyrophosphokinase encoding polynucleotide comprised in SEQ ID NO: 15 or genomic DNA thereof;
i) genes encoding a nthranilate phosphoribosyl transferase said genes being at least 70% identical to the Anthranilate phosphoribosyl transferase encoding polynucleotide comprised in SEQ ID NO: 17 or genomic DNA thereof;
j) genes encoding a N-(5′-phosphoribosyl)-anthranilate isomerase said genes being at least 70% identical to the N-(5′-phosphoribosyl)-anthranilate isomerase encoding polynucleotide comprised in SEQ ID NO: 19 or genomic DNA thereof;
k) genes encoding a Indole-3-glycerol phosphate synthase said genes being at least 70% identical to the Indole-3-glycerol phosphate synthase encoding polynucleotide comprised in SEQ ID NO: 21 or genomic DNA thereof;
l) genes encoding a Tryptophan synthase said genes being at least 70% identical to the Tryptophan synthase encoding polynucleotide comprised in anyone of SEQ ID NO: 23, 59, 61, 63, 65, 67, 179, and/or 181 or genomic DNA thereof;
m) genes encoding a Tryptophan decarboxylase, or a non-canonical aromatic amino acid decarboxylase said genes being at least 70% identical to the Tryptophan decarboxylase or a non-canonical aromatic amino acid decarboxylase encoding polynucleotide comprised in SEQ ID NO: 25, 69, 71, 73, 75, and/or 77 or genomic DNA thereof;
n) genes encoding a Tryptamine 5-hydroxylase said genes being at least 70% identical to the Tryptamine 5-hydroxylase encoding polynucleotide comprised in SEQ ID NO: 96 or genomic DNA thereof;
o) genes encoding a Cytochrome p450 reductase said genes being at least 70% identical to the Cytochrome p450 reductase encoding polynucleotide comprised in SEQ ID NO: 111 or genomic DNA thereof.

129. The host cell of claim 124 to 126 wherein the host cell is a yeast strain modified by attenuating, disrupting and/or deleting one or more native genes selected from:
a) The pyruvate kinase gene comprised in anyone of SEQ ID NO: 27 or any of its paralogs or orthologs having at least 70% identity to SEQ ID NO: 27;
b) The phosphofructokinase gene comprised in anyone of SEQ ID NO: 29 and/or 31 or any of its paralogs or orthologs having at least 70% identity to anyone of SEQ ID NO: 29 and/or 31;
c) The transporters gene comprised in SEQ ID NO: 33 or any of its paralogs or orthologs having at least 70% identity to SEQ ID NO: 33;
d) The DL-glycerol-3-phosphate phosphatase gene comprised in SEQ ID NO: 34 or any of its paralogs or orthologs having at least 70% identity to SEQ ID NO: 34; and/or
e) The tryptophan 2,3-dioxygenase gene comprised in SEQ ID NO: 35 or any of its paralogs or orthologs having at least 70% identity to SEQ ID NO: 35;
f) The cystathionine beta-synthase gene comprised in SEQ ID NO: 36 or any of its paralogs or orthologs having at least 70% identity to SEQ ID NO: 36;
g) The phenylpyruvate decarboxylase gene comprised in SEQ ID NO: 37 or any of its paralogs or orthologs having at least 70% identity to SEQ ID NO: 37;
h) The pyruvate decarboxylase gene comprised in SEQ ID NO: 38 or any of its paralogs or orthologs having at least 70% identity to SEQ ID NO: 38; and/or
i) The histone variant H2AZ gene comprised in SEQ ID NO: 39 or any of its paralogs or orthologs having at least 70% identity to SEQ ID NO: 39.

130. The host cell of claims 124 to 127, wherein the host cell is a yeast strain modified by overexpressing one or more native genes selected from the NADH kinase gene comprised in SEQ ID NO: 185 or any of its paralogs or orthologs having at least 70% identity to SEQ ID NO: 185.

131. A cell culture, comprising host cell of claims 122 to 128 and a growth medium.

132. A method of producing a serotonin indole acceptor comprising:
a) culturing the cell culture of claim 129 at conditions allowing the host cell to produce the serotonin indole acceptor; and
b) optionally recovering and/or isolating the serotonin indole acceptor.

133. The method of claim 113, further comprising one or more elements selected from:
a) culturing the cell culture in a nutrient growth medium;
b) culturing the cell culture under aerobic or anaerobic conditions
c) culturing the cell culture under agitation;
d) culturing the cell culture at a temperature of between 25 to 50° C.;
e) culturing the cell culture at a pH of between 3-9;
f) culturing the cell culture for between 10 hours to 30 days; and
g) culturing the cell culture under fed-batch, repeated fed-batch, continuous, or semi-continuous conditions.

134. The method of claims 130 to 131, further comprising feeding one or more exogenous precursors for serotonine indole acceptor to the cell culture.

135. The method of claims 130 to 132, wherein the recovering and/or isolation step comprises separating a liquid phase of host cell or cell culture from a solid phase of host cell or cell culture to obtain a supernatant comprising the serotonin indole acceptor by one or more steps selected from:
a) disrupting the host cell to release intracellular serotonin indole acceptor into the supernatant;
b) separating the supernatant from the solid phase of the host cell, such as by filtration or gravity separation;
c) contacting the supernatant with one or more adsorbent resins in order to obtain at least a portion of the produced serotonin indole acceptor;
d) contacting the supernatant with one or more ion exchange or reversed-phase chromatography columns in order to obtain at least a portion of the serotonin indole acceptor;
e) extracting the serotonin indole acceptor; and
f) precipitating the serotonin indole acceptor by crystallization or evaporating the solvent of the liquid phase; and optionally isolating the serotonin indole acceptor by filtration or gravity separation;
thereby recovering and/or isolating the serotonin indole acceptor.

136. A fermentation liquid comprising the serotonin indole acceptor comprised in the cell culture of claim 129.

137. The fermentation liquid of claim 134, wherein at least 50%, such as at least 75%, such as at least 95%, such as at least 99% of the host cells are disrupted.

138. The fermentation liquid of claim 134 to 135, wherein at least 50%, such as at least 75%, such as at least 95%, such as at least 99% of solid cellular material has separated from the liquid.

139. The fermentation liquid of claim 131 to 136, further comprising one or more compounds selected from:
a) precursors or products of the operative biosynthetic pathway producing the serotonin indole acceptor;
b) supplemental nutrients comprising trace metals, vitamins, salts, yeast nitrogen base, YNB, and/or amino acids; and
wherein the concentration of the serotonin indole acceptor is at least 1 mg/I liquid.

140. A composition comprising the fermentation liquid of claims 131 to 137 and one or more agents, additives and/or excipients.

141. The composition of claim 138, wherein the fermentation liquid and/or the serotonin indole acceptor have been processed into in a dry solid form, optionally in form of a powder, tablet, capsule, hard chewable and or soft lozenge or a gum.

142. The composition of claim 138, wherein the composition is in a liquid form, optionally in a stabilized liquid form.

143. A genetically modified microbial host cell producing a psilocybin indole acceptor expressing
a) one or more enzymes selected from
i. one or more enzymes converting glucose to fructose-6-phosphate;
ii. a fructose-6-phosphate phosphoketolase converting fructose-6-phosphate to Erythrose-4-phosphate and acetyl phosphate;
iii. a Phosphotransacetylase converting Acetyl phosphate to Acetyl-CoA;
iv. one or more enzymes converting Fructose-6-phosphate to Phosphoenolpyruvate;
v. a 3-deoxy-D-arabino-heptulosonate 7-phosphate synthase (DAHP synthase) converting Phosphoenolpyruvate and Erythrose-4-phosphate to 3-deoxy-D-arabino-heptulosonate-7-phosphate (DAHP);
vi. one or more enzymes converting 3-deoxy-D-arabino-heptulosonate-7-phosphate to 5-enolpyruvoyl-shikimate 3-phosphate;
vii. a Shikimate kinase converting Shikimate to Shikimate-3-phosphate;
viii. a Chorismate synthase converting 5-enolpyruvoyl-shikimate 3-phosphate to Chorismate;
ix. a Anthranilate synthase converting Chorismate to Anthranilate;
x. a Ribose-phosphate pyrophosphokinase converting Ribose-5-phosphate to Phospho-alpha-D-ribosyl-1-pyrophosphate;
xi. a Anthranilate phosphoribosyl transferase converting Anthranilate and Phospho-alpha-D-ribosyl-1-pyrophosphate to N-(5-phosphoribosyl)-anthranilate;
xii. a N-(5′-phosphoribosyl)-anthranilate isomerase converting N-(5-phosphoribosyl)-anthranilate to 1-(o-carboxyphenylamino)-1′-deoxyribulose 5′-phosphate;
xiii. an Indole-3-glycerol phosphate synthase converting 1-(o-carboxyphenylamino)-1′-deoxyribulose 5′-phosphate to (1S,2R)-1-C-(indol-3-yl)-glycerol 3-phosphate;
xiv. a Tryptophan synthase converting (1S,2R)-1-C-(indol-3-yl) glycerol 3-phosphate and Serine to L-Tryptophan; and/or
xv. a Tryptophan decarboxylase converting L-Tryptophan to Tryptamine; and
b) a Tryptamine 4-hydroxylase converting tryptamine to 4-hydroxytryptamine;
c) a Cytochrome p450 reductase assisting tryptamine 4-hydroxylase in converting tryptamine to 4-hydroxytryptamine;
d) a Cytochrome b5 assisting tryptamine 4-hydroxylase in converting tryptamine to 4-hydroxytryptamine;
e) 4-hydroxytryptamine kinase converting 4-hydroxytryptamine to Norbaeocystin; and
f) Psilocybin synthase converting Norbaeocystin to Psilocybin.

144. The host cell of claim 141, wherein the corresponding:
a) fructose-6-phosphate phosphoketolase has at least 70% identity to the fructose-6-phosphate phosphoketolase comprised in SEQ ID NO: 2;
b) phosphotransacetylase has at least 70% identity to the Phosphotransacetylase comprised in SEQ ID NO: 4;
c) 3-deoxy-D-arabino-heptulosonate 7-phosphate synthase has at least 70% identity to the 3-deoxy-D-arabino-heptulosonate 7-phosphate synthase comprised in SEQ ID NO: 6;
d) enzyme converting 3-deoxy-D-arabino-heptulosonate-7-phosphate to 5-enolpyruvoyl-shikimate 3-phosphate has at least 70% identity to the Enzyme comprised in SEQ ID NO: 8;
e) Shikimate kinase has at least 70% identity to the Shikimate kinase comprised in SEQ ID NO: 10;
f) chorismate synthase has at least 70% identity to the Chorismate synthase comprised in SEQ ID NO: 12;
g) anthranilate synthase has at least 70% identity to the Anthranilate synthase comprised in SEQ ID NO: 14;
h) ribose-phosphate pyrophosphokinase has at least 70% identity to the Ribose-phosphate pyrophosphokinase comprised in SEQ ID NO: 16;
i) anthranilate phosphoribosyl transferase has at least 70% identity to the Anthranilate phosphoribosyl transferase comprised in SEQ ID NO: 18;
j) N-(5′-phosphoribosyl)-anthranilate isomerase has at least 70% identity to the N-(5′-phosphoribosyl)-anthranilate isomerase comprised in SEQ ID NO: 20;
k) indole-3-glycerol phosphate synthase has at least 70% identity to the Indole-3-glycerol phosphate synthase comprised in SEQ ID NO: 22;
l) tryptophan synthase has at least 70% identity to the Tryptophan synthase comprised in anyone of SEQ ID NO: 24, 60, 62, 64, 66, 68, 180 and/or 182;
m) tryptophan decarboxylase or a non-canonical aromatic amino acid decarboxylase has at least 70% identity to the Tryptophan decarboxylase or a non-canonical aromatic amino acid decarboxylase comprised in anyone of SEQ ID NO: 26, 70, 72, 74, 76, and/or 78;
n) tryptamine 4-hydroxylase has at least 70% identity to the Tryptamine 4-hydroxylase comprised in anyone of SEQ ID NO 94 and/or 88;
o) cytochrome p450 reductase has at least 70% identity to the Cytochrome p450 reductase comprised in anyone of SEQ ID NO 106 and/or 102;
p) cytochrome b5 has at least 70% identity to the Cytochrome b5 comprised in anyone of SEQ ID NO 254;
q) 4-hydroxytryptamine kinase has at least 70% identity to the 4-hydroxytryptamine kinase comprised in anyone of SEQ ID NO 160 and/or 156; and
r) Psilocybin synthase has at least 70% identity to the psilocybin synthase comprised in anyone of SEQ ID NO 128 and/or 124.

145. The host cell of claim 142, wherein the one or more expressed genes are selected from:
a) genes encoding a fructose-6-phosphate phosphoketolase said genes being at least 70% identical to the fructose-6-phosphate phosphoketolase encoding polynucleotide comprised in SEQ ID NO: 1 or genomic DNA thereof;
b) genes encoding a Phosphotransacetylase said genes being at least 70% identical to the Phosphotransacetylase encoding polynucleotide comprised in SEQ ID NO: 3 or genomic DNA thereof;
c) genes encoding a 3-deoxy-D-arabino-heptulosonate 7-phosphate synthase said genes being at least 70% identical to the 3-deoxy-D-arabino-heptulosonate 7-phosphate synthase encoding polynucleotide comprised in SEQ ID NO: 5 or genomic DNA thereof;
d) genes encoding an enzyme converting 3-deoxy-D-arabino-heptulosonate-7-phosphate to 5-enolpyruvoyl-shikimate 3-phosphate said genes being at least 70% identical to the polynucleotide encoding the enzyme converting 3-deoxy-D-arabino-heptulosonate-7-phosphate to 5-enolpyruvoyl-shikimate 3-phosphate comprised in SEQ ID NO: 7 or genomic DNA thereof;
e) genes encoding a XX said genes being at least 70% identical to the Shikimate kinase encoding polynucleotide comprised in SEQ ID NO: 9 or genomic DNA thereof;
f) genes encoding a Shikimate kinase said genes being at least 70% identical to the Chorismate synthase encoding polynucleotide comprised in SEQ ID NO: 11 or genomic DNA thereof;
g) genes encoding a Anthranilate synthase said genes being at least 70% identical to the Anthranilate synthase encoding polynucleotide comprised in SEQ ID NO: 13 or genomic DNA thereof;
h) genes encoding a Ribose-phosphate pyrophosphokinase said genes being at least 70% identical to the Ribose-phosphate pyrophosphokinase encoding polynucleotide comprised in SEQ ID NO: 15 or genomic DNA thereof;
i) genes encoding a nthranilate phosphoribosyl transferase said genes being at least 70% identical to the Anthranilate phosphoribosyl transferase encoding polynucleotide comprised in SEQ ID NO: 17 or genomic DNA thereof;
j) genes encoding a N-(5′-phosphoribosyl)-anthranilate isomerase said genes being at least 70% identical to the N-(5′-phosphoribosyl)-anthranilate isomerase encoding polynucleotide comprised in SEQ ID NO: 19 or genomic DNA thereof;
k) genes encoding a Indole-3-glycerol phosphate synthase said genes being at least 70% identical to the Indole-3-glycerol phosphate synthase encoding polynucleotide comprised in SEQ ID NO: 21 or genomic DNA thereof;
l) genes encoding a Tryptophan synthase said genes being at least 70% identical to the Tryptophan synthase encoding polynucleotide comprised in anyone of SEQ ID NO: 23, 59, 61, 63, 65, 67, 179, and/or 181 or genomic DNA thereof;
m) genes encoding a Tryptophan decarboxylase or a non-canonical aromatic amino acid decarboxylase said genes being at least 70% identical to the Tryptophan decarboxylase or a non-canonical aromatic amino acid decarboxylase encoding polynucleotide comprised in SEQ ID NO: 25, 69, 71, 73, 75, and/or 77 or genomic DNA thereof;
n) genes encoding a tryptamine 4-hydroxylase said genes at least 70% identical to the tryptamine 4-hydroxylase encoding polynucleotide comprised in SEQ ID NO 93 and/or 87;
o) genes encoding a cytochrome p450 reductase said genes being at least 70% identical to the cytochrome p450 reductase comprised in anyone of SEQ ID NO 105 and/or 101;
p) genes encoding a cytochrome b5 said genes being at least 70% identical to the Cytochrome b5 encoding polynucleotide comprised in SEQ ID NO 253;
q) genes encoding a 4-hydroxytryptamine kinase said genes being at least 70% identical to the 4-hydroxytryptamine kinase encoding polynucleotide comprised SEQ ID NO 159 and/or 155; and/or
r) genes encoding a psilocybin synthase said genes being at least 70% identical to the psilocybin synthase encoding polynucleotide comprised in SEQ ID NO 127 and/or 123.

146. The host cell of claim 141 to 143 wherein the host cell is a yeast strain modified by attenuating, disrupting and/or deleting one or more native genes selected from:
a) The pyruvate kinase gene comprised in anyone of SEQ ID NO: 27 or any of its paralogs or orthologs having at least 70% identity to SEQ ID NO: 27;
b) the phosphofructokinase gene comprised in anyone of SEQ ID NO: 29 and/or 31 or any of its paralogs or orthologs having at least 70% identity to anyone of SEQ ID NO: 29 and/or 31;
c) the transporters gene comprised in SEQ ID NO: 33 or any of its paralogs or orthologs having at least 70% identity to SEQ ID NO: 33;
d) the DL-glycerol-3-phosphate phosphatase gene comprised in SEQ ID NO: 34 or any of its paralogs or orthologs having at least 70% identity to SEQ ID NO: 34;
e) the tryptophan 2,3-dioxygenase gene comprised in SEQ ID NO: 35 or any of its paralogs or orthologs having at least 70% identity to SEQ ID NO: 35;
f) the cystathionine beta-synthase gene comprised in SEQ ID NO: 36 or any of its paralogs or orthologs having at least 70% identity to SEQ ID NO: 36;
g) the phenylpyruvate decarboxylase gene comprised in SEQ ID NO: 37 or any of its paralogs or orthologs having at least 70% identity to SEQ ID NO: 37;
h) the pyruvate decarboxylase gene comprised in SEQ ID NO: 38 or any of its paralogs or orthologs having at least 70% identity to SEQ ID NO: 38;
i) the histone variant H2AZ gene comprised in SEQ ID NO: 39 or any of its paralogs or orthologs having at least 70% identity to SEQ ID NO: 39;
j) the phosphatase gene comprised in SEQ ID NO: 40 or any of its paralogs or orthologs having at least 70% identity to SEQ ID NO: 40;
k) the repressible acid phosphatase gene comprised in anyone of SEQ ID NO: 41, 42, or 43 and/or any of its paralogs or orthologs having at least 70% identity to anyone of SEQ ID NO: 41, 42, and/or 43; and/or
l) the constitutively expressed acid phosphatase gene comprised in SEQ ID NO: 44 and/or any of its paralogs or orthologs having at least 70% identity to SEQ ID NO: 44.

147. The host cell of claims 141 to 144, wherein the host cell is a yeast strain modified by overexpressing one or more native genes selected from the NADH kinase gene comprised in SEQ ID NO: 185 or any of its paralogs or orthologs having at least 70% identity to SEQ ID NO: 185.

148. A cell culture, comprising host cell of claims 141 to 145 and a growth medium.

149. A method of producing a psilocybin indole acceptor comprising:
a) culturing the cell culture of claim 146 at conditions allowing the host cell to produce the psilocybin indole acceptor; and
b) optionally recovering and/or isolating the psilocybin indole acceptor.

150. The method of claim 147, further comprising one or more elements selected from:
a) culturing the cell culture in a nutrient growth medium;
b) culturing the cell culture under aerobic or anaerobic conditions
c) culturing the cell culture under agitation;
d) culturing the cell culture at a temperature of between 25 to 50° C.;
e) culturing the cell culture at a pH of between 3-9;
f) culturing the cell culture for between 10 hours to 30 days; and
g) culturing the cell culture under fed-batch, repeated fed-batch, continuous, or semi-continuous conditions.

151. The method of claims 147 to 148, further comprising feeding one or more exogenous precursors for psilocybin indole acceptor to the cell culture.

152. The method of claims 147 to 149, wherein the recovering and/or isolation step comprises separating a liquid phase of host cell or cell culture from a solid phase of host cell or cell culture to obtain a supernatant comprising the psilocybin indole acceptor by one or more steps selected from:
a) disrupting the host cell to release intracellular psilocybin indole acceptor into the supernatant;
b) separating the supernatant from the solid phase of the host cell, such as by filtration or gravity separation;
c) contacting the supernatant with one or more adsorbent resins in order to obtain at least a portion of the produced psilocybin indole acceptor;
d) contacting the supernatant with one or more ion exchange or reversed-phase chromatography columns in order to obtain at least a portion of the psilocybin indole acceptor;
e) extracting the psilocybin indole acceptor; and
f) precipitating the psilocybin indole acceptor by crystallization or evaporating the solvent of the liquid phase; and optionally isolating the psilocybin indole acceptor by filtration or gravity separation;
thereby recovering and/or isolating the psilocybin indole acceptor.

153. A fermentation liquid comprising the psilocybin indole acceptor comprised in the cell culture of claim 146.

154. The fermentation liquid of claim 151, wherein at least 50%, such as at least 75%, such as at least 95%, such as at least 99% of the host cells are disrupted.

155. The fermentation liquid of claim 151 to 152, wherein at least 50%, such as at least 75%, such as at least 95%, such as at least 99% of solid cellular material has separated from the liquid.

156. The fermentation liquid of claim 151 to 153, further comprising one or more compounds selected from:
a) precursors or products of the operative biosynthetic pathway producing the psilocybin indole acceptor;
b) supplemental nutrients comprising trace metals, vitamins, salts, yeast nitrogen base, YNB, and/or amino acids; and
wherein the concentration of the psilocybin indole acceptor is at least 1 mg/I liquid.

157. A composition comprising the fermentation liquid of claims 151 to 154 and one or more agents, additives and/or excipients.

158. The composition of claim 155, wherein the fermentation liquid and/or the psilocybin indole acceptor have been processed into in a dry solid form, optionally in form of a powder, tablet, capsule, hard chewable and or soft lozenge or a gum.

159. The composition of claim 155, wherein the composition is in a liquid form, optionally in a stabilized liquid form.

The application's sequence listing, which the Patent Office published only in electronic form, follows.

SEQUENCE LISTING (256 sequences)

SEQ ID NO: 1 - DNA, 2478 bp, Bifidobacterium breve
atgacctctccagttattggtactccatggaaaaaattgaacgccccagtttctgaagaatccttggaaggtgttgataagtattggagagttgccaactacttgtccattggtcaaatctacttgaggtctaacccattgatgaaggctccattcactagagaagatgttaagcacagattggttggtcattggggtactactccaggtttgaattttttgatcggtcacatcaacagattcattgctgatcatggtcaaaacaccgttattatcatgggtccaggtcatggtggtccagctggtacttctcaatcttatttggatggtacttacaccgagactttcccaaagattacaaaagatgaagctggcttgcagaagttcttcagacaattttcttatccaggtggtatcccatctcattttgctccagaaacaccaggttctattcatgaaggtggtgaattgggttatgctttgtctcatgcttatggtgccattatggataacccatctttgtttgttccagccatagttggtgatggtgaagctgaaactggtccattggctactggttggcaatctaacaaattggttaacccaagaaccgatggtatcgttttgccaatcttgcatttgaacggttacaagattgctaacccaaccatcttgtccagaatctctgatgaagaattgcacgaattcttccatggtatgggttatgaaccatacgaatttgttgctggtttcgatgatgaagatcacatgtccattcatagaagattcgctgaattgtgggaaaccatttgggacgaaatttgcgatattaaggctgctgctcaaaccgataatgttcatagaccattttaccccatgctgattttcagaactccaaaaggttggacttgcccaaagtacattgatggtaaaaagactgaaggttcttggagagcacatcaagttccattggcatctgctagagatactgaagctcatttcgaagttttgaagaactggttggaaagctacaaacctgaagagttgtttgatgctaatggtgctgttaaggatgatgttttggcttttatgccaaagggtgaattgagaattggtgctaatccaaatgcaaacggtggtgttattagagatgatctgaagttgccaaacttggaagattacgaagtcaaagaagttgccgaatacggtcatggttggggtcaattggaagctactagaactttgggtgcttacaccagagatatcattagaaacaacccaagagacttcagaattttcggtccagacgaaactgcttctaatagattgcaagcttcttacgaggttaccaacaaacaatgggatgctggttacatttccgatgaagttgatgaacatatgcacgtttctggtcaagttgtcgaacaattgtcagaacatcaaatggaaggttttttggaggcttacttgttgactggtagacatggtatttggtcctcttacgaatctttcgttcacgttatcgactctatgttgaatcaacacgctaaatggttggaagccaccgttagagaaattccttggagaaaacctattgcctccatgaacttgttggtttcttcacatgtttggagacaagatcacaacggtttctctcatcaagatccaggtgttacttctgtcttgttgaacaagtgtttccacaacgatcatgtcatcggtatctactttgctactgatgctaacatgttgttggctattgctgaaaagtgttacaagtccaccaacaagattaacgctattattgctggtaaacaaccagctgctacttggttgactttggatgaagctagagctgaattggctaaaggtgctgctgcttgggattgggcttctactgctaaaaacaatgatgaagccgaagttgttttagctgctgctggtgatgttccaactcaagaaattatggctgcttccgacaagttgaaagaattgggtgttaagttcaaggttgttaacgttgccgatttgttgtcattgcaatccgctaaagaaaacgacgaagctttgtcagacgaagaatttgctgatatcttcactgctgataagccagttttgttcgcttatcattcttacgcccatgatgtcagaggtttgatatacgatagaccaaaccacgataacttcaacgttcatggttatgaagaagaaggttctactactaccccatacgatatggttagagttaacagaatcgacaggtacgaattgactgctgaagctttgagaatgattgatgcagataagtacgccgataagatcgacgaattggaaaagttcagagatgaagcctttcaattcgcagttgataagggttatgatcacccagattataccgattgggtttactctggtgttaataccgataagaaaggtgcagttactgctactgctgcaacagctggtgataatgaatga

SEQ ID NO: 2 - protein, 825 aa, Bifidobacterium breve
MTSPVIGTPWKKLNAPVSEESLEGVDKYWRVANYLSIGQIYLRSNPLMKAPFTREDVKHRLVGHWGTTPGLNFLIGHINRFIADHGQNTVIIMGPGHGGPAGTSQSYLDGTYTETFPKITKDEAGLQKFFRQFSYPGGIPSHFAPETPGSIHEGGELGYALSHAYGAIMDNPSLFVPAIVGDGEAETGPLATGWQSNKLVNPRTDGIVLPILHLNGYKIANPTILSRISDEELHEFFHGMGYEPYEFVAGFDDEDHMSIHRRFAELWETIWDEICDIKAAAQTDNVHRPFYPMLIFRTPKGWTCPKYIDGKKTEGSWRAHQVPLASARDTEAHFEVLKNWLESYKPEELFDANGAVKDDVLAFMPKGELRIGANPNANGGVIRDDLKLPNLEDYEVKEVAEYGHGWGQLEATRTLGAYTRDIIRNNPRDFRIFGPDETASNRLQASYEVTNKQWDAGYISDEVDEHMHVSGQVVEQLSEHQMEGFLEAYLLTGRHGIWSSYESFVHVIDSMLNQHAKWLEATVREIPWRKPIASMNLLVSSHVWRQDHNGFSHQDPGVTSVLLNKCFHNDHVIGIYFATDANMLLAIAEKCYKSTNKINAIIAGKQPAATWLTLDEARAELAKGAAAWDWASTAKNNDEAEVVLAAAGDVPTQEIMAASDKLKELGVKFKVVNVADLLSLQSAKENDEALSDEEFADIFTADKPVLFAYHSYAHDVRGLIYDRPNHDNFNVHGYEEEGSTTTPYDMVRVNRIDRYELTAEALRMIDADKYADKIDELEKFRDEAFQFAVDKGYDHPDYTDWVYSGVNTDKKGAVTATAATAGDNE

SEQ ID NO: 3 - DNA, 1002 bp, Clostridium kluyveri
atgaagctgatggaaaacattttcggtttggctaaggctgacaagaagaaaatcgttttggctgaaggtgaagaagagagaaatattagagcctccgaagagattatcagagatggtattgctgatatcatcttggtcggttctgaatccgttatcaaagaaaatgctgctaagttcggtgttaacttggctggtgttgaaatagttgatccagaaacttcttctaagactgctggttacgctaatgccttctacgaaattagaaagaacaagggtgttaccttggaaaaggctgataagatagttagggatccaatctacttcgctaccatgatggttaagttgggtgatgctgatggtttggtttctggtgctattcatacaaccggtgatttgttaagaccaggcttgcaaattgtcaaaactgttccaggtgcttccgttgtttcttctgtttttttgatgtctgttccagactgcgaatatggtgaagatggttttttgttgttcgctgattgtgctgttaacgtttgtccaactgctgaagaattgtcctctattgctattactactgctgaaaccgctaagaacttgtgcaaaattgaacctagagttgccatgttgtctttctctactatgggttctgcttcccatgaattggttgataaggttactaaggctaccaagttggctaaagaagctagaccagatttggatatcgatggtgaattacaattggatgcctccttggttaagaaggttgctgatttgaaagctccaggttctaaagttgctggtaaggctaatgttttgatcttcccagatattcaagctggtaacatcggttacaagttggttcaaagattcgctaaagctgaagccattggtccaatttgtcaaggttttgctaagccaatcaacgacttgtctagaggttgttctgttgatgatatcgttaaggttgttgccgttactgctgttcaagctcaagcacaaggttaa

SEQ ID NO: 4 - protein, 333 aa, Clostridium kluyveri
MKLMENIFGLAKADKKKIVLAEGEEERNIRASEEIIRDGIADIILVGSESVIKENAAKFGVNLAGVEIVDPETSSKTAGYANAFYEIRKNKGVTLEKADKIVRDPIYFATMMVKLGDADGLVSGAIHTTGDLLRPGLQIVKTVPGASVVSSVFLMSVPDCEYGEDGFLLFADCAVNVCPTAEELSSIAITTAETAKNLCKIEPRVAMLSFSTMGSASHELVDKVTKATKLAKEARPDLDIDGELQLDASLVKKVADLKAPGSKVAGKANVLIFPDIQAGNIGYKLVQRFAKAEAIGPICQGFAKPINDLSRGCSVDDIVKVVAVTAVQAQAQG

SEQ ID NO: 5 - DNA, 1113 bp, Saccharomyces cerevisiae
atgagtgaatctccaatgttcgctgccaacggcatgccaaaggtaaatcaaggtgctgaagaagatgtcagaattttaggttacgacccattagcttctccagctctccttcaagtgcaaatcccagccacaccaacttctttggaaactgccaagagaggtagaagagaagctatagatattattaccggtaaagacgacagagttcttgtcattgtcggtccttgttccatccatgatctagaagccgctcaagaatacgctttgagattaaagaaattgtcagatgaattaaaaggtgatttatccatcattatgagagcatacttggagaagccaagaacaaccgtcggctggaaaggtctaattaatgaccctgatgttaacaacactttcaacatcaacaagggtttgcaatccgctagacaattgtttgtcaacttgacaaatatcggtttgccaattggttctgaaatgcttgataccatttctcctcaatacttggctgatttggtgtccttcggtgccattggtgccagaaccaccgaatctcaactgcacagagaattggcctccggtttgtctttcccagttggtttcaagaacggtaccgatggtaccttaaatgttgctgtggatgcttgtcaagccgctgctcattctcaccatttcatgggtgttactctgcatggtgttgctgctatcaccactactaagggtaacgaacactgcttcgttattctaagaggtggtaaaaagggtaccaactacgacgctaagtccgttgcagaagctaaggctcaattgcctgccggttccaacggtctaatgattgactactctcacggtaactccaataaggatttcagaaaccaaccaaaggtcaatgacgttgtttgtgagcaaatcgctaacggtgaaaacgccattaccggtgtcatgattgaatcaaacatcaacgaaggtaaccaaggcatcccagccgaaggtaaagccggcttgaaatatggtgtttccatcactgatgcttgtataggttgggaaactactgaagacgtcttgaggaaattggctgctgctgtcagacaaagaagagaagttaacaagaaatag

SEQ ID NO: 6 - protein, 370 aa, Saccharomyces cerevisiae
MSESPMFAANGMPKVNQGAEEDVRILGYDPLASPALLQVQIPATPTSLETAKRGRREAIDIITGKDDRVLVIVGPCSIHDLEAAQEYALRLKKLSDELKGDLSIIMRAYLEKPRTTVGWKGLINDPDVNNTFNINKGLQSARQLFVNLTNIGLPIGSEMLDTISPQYLADLVSFGAIGARTTESQLHRELASGLSFPVGFKNGTDGTLNVAVDACQAAAHSHHFMGVTLHGVAAITTTKGNEHCFVILRGGKKGTNYDAKSVAEAKAQLPAGSNGLMIDYSHGNSNKDFRNQPKVNDVVCEQIANGENAITGVMIESNINEGNQGIPAEGKAGLKYGVSITDACIGWETTEDVLRKLAAAVRQRREVNKK

SEQ ID NO: 7 - DNA, 4767 bp, Saccharomyces cerevisiae
atggtgcagttagccaaagtcccaattctaggaaatgatattatccacgttgggtataacattcatgaccatttggttgaaaccataattaaacattgtccttcttcgacatacgttatttgcaatgatacgaacttgagtaaagttccatactaccagcaattagtcctggaattcaaggcttctttgccagaaggctctcgtttacttacttatgttgttaaaccaggtgagacaagtaaaagtagagaaaccaaagcgcagctagaagattatcttttagtggaaggatgtactcgtgatacggttatggtagcgatcggtggtggtgttattggtgacatgattgggttcgttgcatctacatttatgagaggtgttcgtgttgtccaagtaccaacatccttattggcaatggtcgattcctccattggtggtaaaactgctattgacactcctctaggtaaaaactttattggtgcattttggcaaccaaaatttgtccttgtagatattaaatggctagaaacgttagccaagagagagtttatcaatgggatggcagaagttatcaagactgcttgtatttggaacgctgacgaatttactagattagaatcaaacgcttcgttgttcttaaatgttgttaatggggcaaaaaatgtcaaggttaccaatcaattgacaaacgagattgacgagatatcgaatacagatattgaagctatgttggatcatacatataagttagttcttgagagtattaaggtcaaagcggaagttgtctcttcggatgaacgtgaatccagtctaagaaaccttttgaacttcggacattctattggtcatgcttatgaagctatactaaccccacaagcattacatggtgaatgtgtgtccattggtatggttaaagaggcggaattatcccgttatttcggtattctctcccctacccaagttgcacgtctatccaagattttggttgcctacgggttgcctgtttcgcctgatgagaaatggtttaaagagctaaccttacataagaaaacaccattggatatcttattgaagaaaatgagtattgacaagaaaaacgagggttccaaaaagaaggtggtcattttagaaagtattggtaagtgctatggtgactccgctcaatttgttagcgatgaagacctgagatttattctaacagatgaaaccctcgtttaccccttcaaggacatccctgctgatcaacagaaagttgttatcccccctggttctaagtccatctccaatcgtgctttaattcttgctgccctcggtgaaggtcaatgtaaaatcaagaacttattacattctgatgatactaaacatatgttaaccgctgttcatgaattgaaaggtgctacgatatcatgggaagataatggtgaaacggtagtggtggaaggacatggtggttccacattgtcagcttgtgctgaccccttatatctaggtaatgcaggtactgcatctagatttttgacttccttggctgccttggtcaattctacttcaagccaaaagtatatcgttttaactggtaacgcaagaatgcaacaaagaccaattgctcctttggtcgattctttgcgtgctaatggtactaaaattgagtacttgaataatgaaggttccctgccaatcaaagtttatactgattcggtattcaaaggtggtagaattgaattagctgctacagtttcttctcagtacgtatcctctatcttgatgtgtgccccatacgctgaagaacctgtaactttggctcttgttggtggtaagccaatctctaaattgtacgtcgatatgacaataaaaatgatggaaaaattcggtatcaatgttgaaacttctactacagaaccttacacttattatattccaaagggacattatattaacccatcagaatacgtcattgaaagtgatgcctcaagtgctacatacccattggccttcgccgcaatgactggtactaccgtaacggttccaaacattggttttgagtcgttacaaggtgatgccagatttgcaagagatgtcttgaaacctatgggttgtaaaataactcaaacggcaacttcaactactgtttcgggtcctcctgtaggtactttaaagccattaaaacatgttgatatggagccaatgactgatgcgttcttaactgcatgtgttgttgccgctatttcgcacgacagtgatccaaattctgcaaatacaaccaccattgaaggtattgcaaaccagcgtgtcaaagagtgtaacagaattttggccatggctacagagctcgccaaatttggcgtcaaaactacagaattaccagatggtattcaagtccatggtttaaactcgataaaagatttgaaggttccttccgactcttctggacctgtcggtgtatgcacatatgatgatcatcgtgtggccatgagtttctcgcttcttgcaggaatggtaaattctcaaaatgaacgtgacgaagttgctaatcctgtaagaatacttgaaagacattgtactggtaaaacctggcctggctggtgggatgtgttacattccgaactaggtgccaaattagatggtgcagaacctttagagtgcacatccaaaaagaactcaaagaaaagcgttgtcattattggcatgagagcagctggcaaaactactataagtaaatggtgcgcatccgctctgggttacaaattagttgacctagacgagctgtttgagcaacagcataacaatcaaagtgttaaacaatttgttgtggagaacggttgggagaagttccgtgaggaagaaacaagaattttcaaggaagttattcaaaattacggcgatgatggatatgttttctcaacaggtggcggtattgttgaaagcgctgagtctagaaaagccttaaaagattttgcctcatcaggtggatacgttttacacttacatagggatattgaggagacaattgtctttttacaaagtgatccttcaagacctgcctatgtggaagaaattcgtgaagtttggaacagaagggaggggtggtataaagaatgctcaaatttctctttctttgctcctcattgctccgcagaagctgagttccaagctctaagaagatcgtttagtaagtacattgcaaccattacaggtgtcagagaaatagaaattccaagcggaagatctgcctttgtgtgtttaacctttgatgacttaactgaacaaactgagaatttgactccaatctgttatggttgtgaggctgtagaggtcagagtagaccatttggctaattactctgctgatttcgtgagtaaacagttatctatattgcgtaaagccactgacagtattcctatcatttttactgtgcgaaccatgaagcaaggtggcaactttcctgatgaagagttcaaaaccttgagagagctatacgatattgccttgaagaatggtgttgaattccttgacttagaactaactttacctactgatatccaatatgaggttattaacaaaaggggcaacaccaagatcattggttcccatcatgacttccaaggattatactcctgggacgacgctgaatgggaaaacagattcaatcaagcgttaactcttgatgtggatgttgtaaaatttgtgggtacggctgttaatttcgaagataatttgagactggaacactttagggatacacacaagaataagcctttaattgcagttaatatgacttctaaaggtagcatttctcgtgttttgaataatgttttaacacctgtgacatcagatttattgcctaactccgctgcccctggccaattgacagtagcacaaattaacaagatgtatacatctatgggaggtatcgagcctaaggaactgtttgttgttggaaagccaattggccactctagatcgccaattttacataacactggctatgaaattttaggtttacctcacaagttcgataaatttgaaactgaatccgcacaattggtgaaagaaaaacttttggacggaaacaagaactttggcggtgctgcagtcacaattcctctgaaattagatataatgcagtacatggatgaattgactgatgctgctaaagttattggtgctgtaaacacagttataccattgggtaacaagaagtttaagggtgataataccgactggttaggtatccgtaatgccttaattaacaatggcgttcccgaatatgttggtcataccgctggtttggttatcggtgcaggtggcacttctagagccgccctttacgccttgcacagtttaggttgcaaaaagatcttcataatcaacaggacaacttcgaaattgaagccattaatagagtcacttccatctgaattcaacattattggaatagagtccactaaatctatagaagagattaaggaacacgttggcgttgctgtcagctgtgtaccagccgacaaaccattagatgacgaacttttaagtaagctggagagattccttgtgaaaggtgcccatgctgcttttgtaccaaccttattggaagccgcatacaaaccaagcgttactcccgttatgacaatttcacaagacaaatatcaatggcacgttgtccctggatcacaaatgttagtacaccaaggtgtagctcagtttgaaaagtggacaggattcaagggccctttcaaggccatttttgatgccgttacgaaagagtag

SEQ ID NO: 8 - protein, 1588 aa, Saccharomyces cerevisiae
MVQLAKVPILGNDIIHVGYNIHDHLVETIIKHCPSSTYVICNDTNLSKVPYYQQLVLEFKASLPEGSRLLTYVVKPGETSKSRETKAQLEDYLLVEGCTRDTVMVAIGGGVIGDMIGFVASTFMRGVRVVQVPTSLLAMVDSSIGGKTAIDTPLGKNFIGAFWQPKFVLVDIKWLETLAKREFINGMAEVIKTACIWNADEFTRLESNASLFLNVVNGAKNVKVTNQLTNEIDEISNTDIEAMLDHTYKLVLESIKVKAEVVSSDERESSLRNLLNFGHSIGHAYEAILTPQALHGECVSIGMVKEAELSRYFGILSPTQVARLSKILVAYGLPVSPDEKWFKELTLHKKTPLDILLKKMSIDKKNEGSKKKVVILESIGKCYGDSAQFVSDEDLRFILTDETLVYPFKDIPADQQKVVIPPGSKSISNRALILAALGEGQCKIKNLLHSDDTKHMLTAVHELKGATISWEDNGETVVVEGHGGSTLSACADPLYLGNAGTASRFLTSLAALVNSTSSQKYIVLTGNARMQQRPIAPLVDSLRANGTKIEYLNNEGSLPIKVYTDSVFKGGRIELAATVSSQYVSSILMCAPYAEEPVTLALVGGKPISKLYVDMTIKMMEKFGINVETSTTEPYTYYIPKGHYINPSEYVIESDASSATYPLAFAAMTGTTVTVPNIGFESLQGDARFARDVLKPMGCKITQTATSTTVSGPPVGTLKPLKHVDMEPMTDAFLTACVVAAISHDSDPNSANTTTIEGIANQRVKECNRILAMATELAKFGVKTTELPDGIQVHGLNSIKDLKVPSDSSGPVGVCTYDDHRVAMSFSLLAGMVNSQNERDEVANPVRILERHCTGKTWPGWWDVLHSELGAKLDGAEPLECTSKKNSKKSVVIIGMRAAGKTTISKWCASALGYKLVDLDELFEQQHNNQSVKQFVVENGWEKFREEETRIFKEVIQNYGDDGYVFSTGGGIVESAESRKALKDFASSGGYVLHLHRDIEETIVFLQSDPSRPAYVEEIREVWNRREGWYKECSNFSFFAPHCSAEAEFQALRRSFSKYIATITGVREIEIPSGRSAFVCLTFDDLTEQTENLTPICYGCEAVEVRVDHLANYSADFVSKQLSILRKATDSIPIIFTVRTMKQGGNFPDEEFKTLRELYDIALKNGVEFLDLELTLPTDIQYEVINKRGNTKIIGSHHDFQGLYSWDDAEWENRFNQALTLDVDVVKFVGTAVNFEDNLRLEHFRDTHKNKPLIAVNMTSKGSISRVLNNVLTPVTSDLLPNSAAPGQLTVAQINKMYTSMGGIEPKELFVVGKPIGHSRSPILHNTGYEILGLPHKFDKFETESAQLVKEKLLDGNKNFGGAAVTIPLKLDIMQYMDELTDAAKVIGAVNTVIPLGNKKFKGDNTDWLGIRNALINNGVPEYVGHTAGLVIGAGGTSRAALYALHSLGCKKIFIINRTTSKLKPLIESLPSEFNIIGIESTKSIEEIKEHVGVAVSCVPADKPLDDELLSKLERFLVKGAHAAFVPTLLEAAYKPSVTPVMTISQDKYQWHVVPGSQMLVHQGVAQFEKWTGFKGPFKAIFDAVTKE

SEQ ID NO: 9 - DNA, 525 bp, Escherichia coli
atgacccaacctttgtttttgattggtccaagaggttgtggtaagactactgttggtatggctttggctgattctttgaacagaagattcgttgataccgaccaatggttgcaatctcaattgaatatgaccgttgccgaaatcgttgaaagggaagaatgggctggttttagagctagagaaactgctgctttggaagctgttactgctccatctactgttattgctactggtggtggtattatcttgaccgaattcaacagacacttcatgcaaaacaacggtatcgttgtctatttgtgtgctccagtttctgttttggtcaacagattgcaagctgctccagaagaagatctaagaccaactttgactggtaagccattgtctgaagaagttcaagaagtcttggaagaaagagatgccttgtatagagaagttgcccatattatcattgacgctaccaatgaaccatctcaggttatctctgaaattagatctgctttggcccaaaccattaactgctaa

SEQ ID NO: 10 - protein, 174 aa, Escherichia coli
MTQPLFLIGPRGCGKTTVGMALADSLNRRFVDTDQWLQSQLNMTVAEIVEREEWAGFRARETAALEAVTAPSTVIATGGGIILTEFNRHFMQNNGIVVYLCAPVSVLVNRLQAAPEEDLRPTLTGKPLSEEVQEVLEERDALYREVAHIIIDATNEPSQVISEIRSALAQTINC

SEQ ID NO: 11 - DNA, 1131 bp, Saccharomyces cerevisiae
atgtcaacgtttgggaaactgttccgcgtcaccacatatggtgaatcgcattgtaagtctgtcggttgcattgtcgacggtgttcctccaggaatgtcattaaccgaagctgacattcagccacaattgaccagaagaagaccgggtcaatctaagctatcgacccctagagatgaaaaggatagagtggaaatccagtccggtaccgagttcggcaagactctaggtacacccatcgccatgatgatcaaaaacgaggaccaaagacctcacgactactccgacatggacaagttccctagaccttcccatgcggacttcacgtactcggaaaagtacggtatcaaggcctcctctggtggtggcagagcttctgctagagaaacgattggccgtgtcgcttcaggtgccattgctgagaagttcttagctcagaactctaatgtcgagatcgtagcctttgtgacacaaatcggggaaatcaagatgaacagagactctttcgatcctgaatttcagcatctgttgaacaccatcaccagggaaaaagtggactcaatgggtcctatcagatgtccagacgcctccgttgctggtttgatggtcaaggaaatcgaaaagtacagaggcaacaaggactctatcggtggtgtcgtcacttgtgtcgtgagaaacttgcctaccggcctcggtgagccatgctttgacaagttggaagccatgttggctcatgctatgttgtccattccagcatccaagggtttcgaaattggctcaggttttcagggtgtctctgttccagggtccaagcacaatgacccattttactttgaaaaagaaacaaacagattaagaacaaagaccaacaattcaggtggtgtacaaggtggtatctctaatggtgagaacatctatttctctgtcccattcaagtcagtggccactatctctcaagaacaaaaaaccgccacttacgatggtgaagaaggtatcttagccgctaagggtagacatgaccctgctgtcactccaagagctattcctattgtggaagccatgaccgctctggtgttggctgacgcgcttttgatccaaaaggcaagagatttctccagatccgtggttcattaa

SEQ ID NO: 12 - protein, 376 aa, Saccharomyces cerevisiae
MSTFGKLFRVTTYGESHCKSVGCIVDGVPPGMSLTEADIQPQLTRRRPGQSKLSTPRDEKDRVEIQSGTEFGKTLGTPIAMMIKNEDQRPHDYSDMDKFPRPSHADFTYSEKYGIKASSGGGRASARETIGRVASGAIAEKFLAQNSNVEIVAFVTQIGEIKMNRDSFDPEFQHLLNTITREKVDSMGPIRCPDASVAGLMVKEIEKYRGNKDSIGGVVTCVVRNLPTGLGEPCFDKLEAMLAHAMLSIPASKGFEIGSGFQGVSVPGSKHNDPFYFEKETNRLRTKTNNSGGVQGGISNGENIYFSVPFKSVATISQEQKTATYDGEEGILAAKGRHDPAVTPRAIPIVEAMTALVLADALLIQKARDFSRSVVH

SEQ ID NO: 13 - DNA, 1524 bp, Saccharomyces cerevisiae
atgaccgcttccatcaaaattcaaccggatattgactctctaaagcaattacagcagcaaaatgacgatagttccataaatatgtatcccgtgtatgcgtatttgccatcattggatctgactcctcacgtggcatatctaaaattggcacaattgaacaaccctgatagaaaggaatcatttctgttggaacgtgctaagacaaataatgaattagatcgttatctgttcataggtatctcgccacgcaagaccatcaaaaccggtcctactgaaggcattgaaacagatcctttggaaattttggaaaaggagatgtctacctttaaagtagccgaaaatgttcctggtttaccgaaattaagtggtggtgctattggttatatttcttatgactgtgttcgttatttcgagccaaaaacaagaaggcctttgaaagatgtcctaagacttccagaggcatatttaatgctttgtgataccattattgcctttgataatgtttttcagagatttcaaatcattcataacattaataccaatgaaacttcgttggaggaaggttaccaagctgcagcacaaataatcactgatatcgtatcaaagctaaccgacgattcctcgccaataccatatccagaacaacctcctattaaattgaatcaaacttttgaatcgaatgtgggcaaggaaggttacgaaaatcacgtgtccactttgaagaagcatattaagaaaggtgatattattcaaggtgtgccatcgcaaagagtggcaaggccaacttcgttacatcctttcaatatttacagacatttacgtacagtgaacccatctccttacctgttttatattgattgtttggatttccaaatcattggtgcatctccagaattgttgtgcaaatcggattccaaaaatagagtcattacccatccaattgctggtactgtcaaacgtggggctactactgaagaggatgatgctttagcggaccaattacgtggctcgttaaaagaccgtgcagaacatgttatgctggtagatttagcaagaaacgatattaacagaatttgtgacccattaacaacaagtgtcgataaactgttaactattcaaaaattttctcatgtccaacatctggtttctcaagtcagcggtgttctccgcccagaaaagacaagatttgatgcattcagatcgattttccctgcaggtactgtcagtggtgctccaaaggttagagccatggaattgattgccgaactagaaggagaaaggcgtggggtttatgcaggcgccgtaggtcattggtcatacgacggtaaaacaatggacaattgtatcgctttaaggactatggtctataaagatggcattgcttacttgcaagctggcggtggtattgtttacgattcagatgagtacgatgaatatgtcgaaaccatgaataaaatgatggccaatcacagtactattgtgcaagcagaagaattgtgggccgatatcgtaggatcagcttaa

SEQ ID NO: 14 - protein, 507 aa, Saccharomyces cerevisiae
MTASIKIQPDIDSLKQLQQQNDDSSINMYPVYAYLPSLDLTPHVAYLKLAQLNNPDRKESFLLERAKTNNELDRYLFIGISPRKTIKTGPTEGIETDPLEILEKEMSTFKVAENVPGLPKLSGGAIGYISYDCVRYFEPKTRRPLKDVLRLPEAYLMLCDTIIAFDNVFQRFQIIHNINTNETSLEEGYQAAAQIITDIVSKLTDDSSPIPYPEQPPIKLNQTFESNVGKEGYENHVSTLKKHIKKGDIIQGVPSQRVARPTSLHPFNIYRHLRTVNPSPYLFYIDCLDFQIIGASPELLCKSDSKNRVITHPIAGTVKRGATTEEDDALADQLRGSLKDRAEHVMLVDLARNDINRICDPLTTSVDKLLTIQKFSHVQHLVSQVSGVLRPEKTRFDAFRSIFPAGTVSGAPKVRAMELIAELEGERRGVYAGAVGHWSYDGKTMDNCIALRTMVYKDGIAYLQAGGGIVYDSDEYDEYVETMNKMMANHSTIVQAEELWADIVGSA

SEQ ID NO: 15 - DNA, 954 bp, Bacillus subtilis
atgtctaatcagtacggtgacaagaacctgaagattttctctttgaactctaacccagaactggccaaagaaattgctgatatagttggtgtccaattgggtaaatgttccgttactagattctccgatggtgaagttcaaatcaacatcgaagaatccattagaggttgcgattgctatatcatccaatctacatctgatccagtcaacgaacacatcatggaactgttgattatggttgatgctttgaagagagcttctgccaagactattaacatcgttattccttactacggttacgccagacaagatagaaaagctagatcaagagaacctattaccgctaagttgttcgctaacttgttggaaactgctggtgctactagagttattgctttggacttgcatgctccacaaattcaaggtttcttcgatatcccaatcgatcacttgatgggtgttccaattttgggtgaatacttcgaaggtaagaacttggaagatatcgtcatcgtttctccagatcatggtggtgttacaagagctagaaaattggctgatagattgaaggctccaattgccattattgataagagaaggccaagaccaaatgttgccgaagttatgaatatcgtcggtaacattgaaggtaaaaccgccattttgatcgatgacattatagataccgctggcactattactttggctgctaatgctttggttgaaaacggtgctaaagaagtttacgcttgttgtactcatccagttttgtctggtccagctgttgaaagaatcaacaactctaccatcaaagaattggtcgtcaccaactctattaagttgccagaagaaaagaagatcgagaggttcaagcaattgtctgttggtccattattggccgaagccattataagagttcacgaacaacaatccgtgtcctacttgttctcttag

SEQ ID NO: 16 - protein, 317 aa, Bacillus subtilis
MSNQYGDKNLKIFSLNSNPELAKEIADIVGVQLGKCSVTRFSDGEVQINIEESIRGCDCYIIQSTSDPVNEHIMELLIMVDALKRASAKTINIVIPYYGYARQDRKARSREPITAKLFANLLETAGATRVIALDLHAPQIQGFFDIPIDHLMGVPILGEYFEGKNLEDIVIVSPDHGGVTRARKLADRLKAPIAIIDKRRPRPNVAEVMNIVGNIEGKTAILIDDIIDTAGTITLAANALVENGAKEVYACCTHPVLSGPAVERINNSTIKELVVTNSIKLPEEKKIERFKQLSVGPLLAEAIIRVHEQQSVSYLFS

SEQ ID NO: 17 - DNA, 1143 bp, Saccharomyces cerevisiae
atgtccgaggcgactttgctatcttacaccaagaaattattggcttctccgccgcaattgagtagcacagacctacacgatgcgttgctggttatattaagtcttttgcaaaaatgtgatacaaatagcgatgagagtctttccatctataccaaagtttcgagttttctcacggccttgagagttactaaacttgatcacaaggctgaatacattgcggaagctgcaaaggctgtgctcagacattccgaccttgttgatctacctttacccaagaaggacgaattacacccggaagatggaccagtaatcttagatattgtaggtactggtggtgacggacagaatacttttaatgtttccacgtctgctgctatcgttgcctccggaattcagggcctaaaaatttgtaagcacggtggtaaagcttctacatccaatagtggagctggtgacctaattggaactttaggctgtgacatgttcaaggttaattcatcgacagtgcccaaactttggcctgataatacgttcatgtttctacttgctcctttttttcatcatggaatgggccacgtttctaagatacgcaaatttcttggaattccgactgttttcaacgtactgggaccacttctacatccagttagccacgtaaacaagagaatattgggcgtttactcaaaggaacttgcgcctgaatatgccaaggcagccgctttggtatatccaggaagcgaaacttttatagtttggggacatgttgggttagacgaagtatcacctataggcaaaactactgtctggcatattgatccgacatcgtccgaacttaaattgaagaccttccaattagaaccttctatgtttggtttagaagaacacgagttgtcgaagtgtgcttcatacggccctaaagagaatgcgagaattctaaaagaagaagtcttgtccggcaagtaccaccttggcgacaataatcctatttatgactacatcttgatgaacaccgccgtgttatattgtttaagccaaggtcaccagaactggaaggaagggatcattaaggcagaagaaagcatacattctggtaatgcattacgttctttagaacactttatagatagtgtgagctccttgtag

SEQ ID NO: 18 - protein, 380 aa, Saccharomyces cerevisiae
MSEATLLSYTKKLLASPPQLSSTDLHDALLVILSLLQKCDTNSDESLSIYTKVSSFLTALRVTKLDHKAEYIAEAAKAVLRHSDLVDLPLPKKDELHPEDGPVILDIVGTGGDGQNTFNVSTSAAIVASGIQGLKICKHGGKASTSNSGAGDLIGTLGCDMFKVNSSTVPKLWPDNTFMFLLAPFFHHGMGHVSKIRKFLGIPTVFNVLGPLLHPVSHVNKRILGVYSKELAPEYAKAAALVYPGSETFIVWGHVGLDEVSPIGKTTVWHIDPTSSELKLKTFQLEPSMFGLEEHELSKCASYGPKENARILKEEVLSGKYHLGDNNPIYDYILMNTAVLYCLSQGHQNWKEGIIKAEESIHSGNALRSLEHFIDSVSSL

SEQ ID NO: 19 - DNA, 675 bp, Saccharomyces cerevisiae
atgtctgttattaatttcacaggtagttctggtccattggtgaaagtttgcggcttgcagagcacagaggccgcagaatgtgctctagattccgatgctgacttgctgggtattatatgtgtgcccaatagaaagagaacaattgacccggttattgcaaggaaaatttcaagtcttgtaaaagcatataaaaatagttcaggcactccgaaatacttggttggcgtgtttcgtaatcaacctaaggaggatgttttggctctggtcaatgattacggcattgatatcgtccaactgcatggagatgagtcgtggcaagaataccaagagttcctcggtttgccagttattaaaagactcgtatttccaaaagactgcaacatactactcagtgcagcttcacagaaacctcattcgtttattcccttgtttgattcagaagcaggtgggacaggtgaacttttggattggaactcgatttctgactgggttggaaggcaagagagccccgaaagcttacattttatgttagctggtggactgacgccagaaaatgttggtgatgcgcttagattaaatggcgttattggtgttgatgtaagcggaggtgtggagacaaatggtgtaaaagactctaacaaaatagcaaatttcgtcaaaaatgctaagaaatag

SEQ ID NO: 20 - protein, 224 aa, Saccharomyces cerevisiae
MSVINFTGSSGPLVKVCGLQSTEAAECALDSDADLLGIICVPNRKRTIDPVIARKISSLVKAYKNSSGTPKYLVGVFRNQPKEDVLALVNDYGIDIVQLHGDESWQEYQEFLGLPVIKRLVFPKDCNILLSAASQKPHSFIPLFDSEAGGTGELLDWNSISDWVGRQESPESLHFMLAGGLTPENVGDALRLNGVIGVDVSGGVETNGVKDSNKIANFVKNAKK

SEQ ID NO: 21 - DNA, 1455 bp, Saccharomyces cerevisiae
atgtctgtgcacgctgcaacaaacccaatcaataagcatgtggttctaattgacaactacgattcctttacctggaacgtttacgagtacttgtgccaggagggcgccaaagtgagcgtctaccgtaacgatgcaattacagttccagaaattgccgccttgaatcccgacacattgcttatctcgcctggaccaggccacccaaagacagattctggcatttcaagagactgtatccggtactttactgggaaaattcctgtatttggaatctgtatgggccagcaatgcatgtttgacgtatttggtggtgaagttgcctacgctggtgagattgtccacggtaaaacgtccccaatctctcacgacaactgtggaattttcaagaacgtgccgcaaggtattgctgtgacaagataccattcattggccgggacagaatcgtccctaccatcctgcttgaaggttactgcgagtaccgaaaatggaattatcatgggtgtaagacacaagaagtacactgtagaaggtgtgcaatttcatccggaatccatcttgaccgaggaaggtcatctgatgatcaggaacattttaaacgtcagtggaggcacttgggaggaaaacaaatcatctccttcaaattctattttggaccgtatctatgctcggcgtaaaatagacgtcaatgagcagtctaaaatcccaggtttcacctttcaagacttacaatctaactatgatttaggtcttgccccaccgttacaggatttctacacggtgttgtcatcatcccataaaagagccgttgttcttgctgaagtcaagcgtgcctctccatcgaagggacccatttgtttaaaagctgttgctgctgaacaggctctcaaatacgcagaggctggtgcatccgcaatttccgtattgaccgaacctcattggtttcacggttcgttacaggatttagtaaatgtgaggaaaatcctagatttgaaatttcctcccaaggagaggccttgtgttttgagaaaagaatttattttcagcaagtatcaaatactagaagcaagattagctggagctgacactgtccttcttatagtcaagatgctatctcaacccttattgaaggaactgtacagctacagtaaagatttgaacatggaacctctcgttgaggtgaactccaaagaggaattacaaagggctctagaaattggtgctaaagttgtaggtgtcaataatagggacctgcattcattcaacgtagacctaaataccaccagtaacttggtagaatctattccaaaggatgttcttctaattgctctatcgggaattaccaccagggacgatgctgaaaaatacaaaaaagaaggtgtccatggatttttagtgggtgaagccctaatgaaatcaaccgatgtgaagaagttcattcatgaattatgcgaataa

SEQ ID NO: 22 - protein, 484 aa, Saccharomyces cerevisiae
MSVHAATNPINKHVVLIDNYDSFTWNVYEYLCQEGAKVSVYRNDAITVPEIAALNPDTLLISPGPGHPKTDSGISRDCIRYFTGKIPVFGICMGQQCMFDVFGGEVAYAGEIVHGKTSPISHDNCGIFKNVPQGIAVTRYHSLAGTESSLPSCLKVTASTENGIIMGVRHKKYTVEGVQFHPESILTEEGHLMIRNILNVSGGTWEENKSSPSNSILDRIYARRKIDVNEQSKIPGFTFQDLQSNYDLGLAPPLQDFYTVLSSSHKRAVVLAEVKRASPSKGPICLKAVAAEQALKYAEAGASAISVLTEPHWFHGSLQDLVNVRKILDLKFPPKERPCVLRKEFIFSKYQILEARLAGADTVLLIVKMLSQPLLKELYSYSKDLNMEPLVEVNSKEELQRALEIGAKVVGVNNRDLHSFNVDLNTTSNLVESIPKDVLLIALSGITTRDDAEKYKKEGVHGFLVGEALMKSTDVKKFIHELCE

SEQ ID NO: 23 - DNA, 2124 bp, Saccharomyces cerevisiae
atgtcagaacaactcagacaaacatttgctaacgctaaaaaagaaaacaggaacgccttggtcacatttatgaccgcaggttacccaacagtcaaagacactgtccctattctcaagggtttccaggatggtggtgtagatatcatcgaattgggtatgcccttctctgatccaattgcagatggtcctacaattcaattatctaatactgtggctttgcaaaacggtgttaccttgcctcaaactctagaaatggtctcccaagctagaaatgaaggtgttaccgtacccataatcctaatgggttactataaccctattctaaactacggtgaagaaagatttattcaggacgctgccaaggctggtgctaatggttttatcatcgtcgatttgccaccagaggaggcgttgaaggtcagaaactacatcaatgataatggtttgagcctgatcccactagtggctccttctaccaccgacgaaagattggaattactatcgcatattgccgattcgtttgtctacgttgtgtctagaatgggtactactggtgttcaaagttctgtggccagtgatttggatgaactcatctctagagtcagaaagtacaccaaggatactcctttggccgttgggtttggtgtctctaccagagaacatttccaatcagttggtagtgttgctgacggtgtagtgattggttccaaaatcgtcacattatgtggagatgctccagagggcaaaaggtacgacgttgctaaggaatatgtacagggaattctaaatggtgctaagcataaggttctgtccaaggacgaattctttgcctttcaaaaagagtccttgaagtccgcaaacgttaagaaggaaatactggacgaatttgatgaaaatcacaagcacccaattagatttggggactttggtggtcagtatgtcccagaagctcttcatgcatgtctaagagagttggaaaagggttttgatgaagctgtcgccgatcccacattctgggaagacttcaaatccttgtattcttatattggccgtccttcttcactacacaaagctgagagattaactgagcattgtcaaggtgctcaaatctggttgaagagagaagatcttaaccacacgggatctcacaagatcaacaatgctttagcacaagttcttctagctaaaagattaggcaagaagaacgttattgctgaaaccggtgctggtcaacacggtgttgccactgccactgcatgtgctaaatttggcttaacctgtactgtgttcatgggtgcagaagatgttcgtcgccaagctttaaacgtcttcagaatgagaattctcggtgctaaagtaattgctgttactaatggtacaaagactctaagagacgctacttcagaggcattcagattttgggttactaacttgaaaactacttactacgtcgtcggttctgccattggtcctcacccatatccaactttggttagaactttccaaagtgtcattggtaaagaaaccaaggaacagtttgctgccatgaacaatggtaaattacctgacgcagttgttgcatgtgttgggggtggttccaactctacaggtatgttttcaccattcgagcatgatacttccgttaagttattgggtgtggaagccggtggtgatggtgtagatacaaagttccactctgctactctaactgccggtagacctggtgtcttccatggtgtcaagacttatgtcttgcaagatagtgatggtcaagtccatgatactcattctgtttctgctgggttagactacccaggtgtcggtccagaattggcatattggaaatctactggccgtgctcaattcattgcagctactgacgctcaggctctgcttggctttaaattattatctcaattagaaggtattattcccgctttggaatcttctcatgctgtttatggcgcttgcgaattggctaagacgatgaagcctgatcaacatttggttatcaatatttctggtagaggtgataaagatgtccaaagtgtcgctgaagtcttgccgaaattaggtccaaagataggttgggatttgagattcgaagaagacccatctgcctaa

SEQ ID NO: 24 - protein, 707 aa, Saccharomyces cerevisiae
MSEQLRQTFANAKKENRNALVTFMTAGYPTVKDTVPILKGFQDGGVDIIELGMPFSDPIADGPTIQLSNTVALQNGVTLPQTLEMVSQARNEGVTVPIILMGYYNPILNYGEERFIQDAAKAGANGFIIVDLPPEEALKVRNYINDNGLSLIPLVAPSTTDERLELLSHIADSFVYVVSRMGTTGVQSSVASDLDELISRVRKYTKDTPLAVGFGVSTREHFQSVGSVADGVVIGSKIVTLCGDAPEGKRYDVAKEYVQGILNGAKHKVLSKDEFFAFQKESLKSANVKKEILDEFDENHKHPIRFGDFGGQYVPEALHACLRELEKGFDEAVADPTFWEDFKSLYSYIGRPSSLHKAERLTEHCQGAQIWLKREDLNHTGSHKINNALAQVLLAKRLGKKNVIAETGAGQHGVATATACAKFGLTCTVFMGAEDVRRQALNVFRMRILGAKVIAVTNGTKTLRDATSEAFRFWVTNLKTTYYVVGSAIGPHPYPTLVRTFQSVIGKETKEQFAAMNNGKLPDAVVACVGGGSNSTGMFSPFEHDTSVKLLGVEAGGDGVDTKFHSATLTAGRPGVFHGVKTYVLQDSDGQVHDTHSVSAGLDYPGVGPELAYWKSTGRAQFIAATDAQALLGFKLLSQLEGIIPALESSHAVYGACELAKTMKPDQHLVINISGRGDKDVQSVAEVLPKLGPKIGWDLRFEEDPSA

SEQ ID NO: 25 - DNA, 1503 bp, Catharanthus roseus
atgggttctattgattctaccaacgtcgctatgtctaattctccagttggtgaatttaagccattggaagccgaagaatttagaaagcaagctcacagaatggttgatttcattgccgattactacaagaacgttgaaacctacccagttttgtctgaagttgaaccaggttacttgagaaagagaataccagaaactgctccatatttgccagaaccattggatgatattatgaaggacatccaaaaggacatcattccaggtatgactaattggatgtctccaaacttttacgctttcttccctgctactgtttcttctgctgcttttttgggtgaaatgttgtctactgctttgaactctgttggtttcacttgggtttcttcaccagctgctactgaattggaaatgatagttatggattggttggcccaaatcttgaagttgccaaagtcttttatgttctctggtactggtggtggtgttattcaaaacactacctccgaatctattttgtgcaccattattgctgctagagaaagagctttggaaaagttgggtccagattccattggtaaattggtttgttacggttctgatcaaacccataccatgtttccaaagacttgtaaattggctggtatctacccaaacaacatcagattgattccaaccactgttgaaaccgatttcggtatttctccacaagttttaagaaagatggtcgaagatgatgttgctgctggttatgttcctttgtttttgtgtgctactttgggtactacttctactactgctacagatccagttgactccttgtctgaaattgctaacgaatttggtatctggattcatgttgatgctgcttacgctggttctgcttgtatttgtcctgaatttagacactacttggacggtatcgaaagagtcgattctttgtctttgtctccacataagtggttgttggcttatttggattgcacttgtttgtgggttaagcaaccacatttgttgttgagagctttgactaccaatccagaatacttgaagaacaagcaatccgatttggataaggtcgttgactttaagaactggcaaattgctactggtagaaagttcagatccttgaaattgtggttgatcttgagatcctacggtgttgttaacttgcaatcccacattagatcagatgttgctatgggtaagatgtttgaagaatgggttagatccgactccagattcgaaatagttgttccaagaaacttctcattggtctgctttagattgaagccagatgtttcctcattgcacgttgaagaagtcaacaaaaagttgttggacatgttgaactctacaggtagagtctacatgactcatacaatagtcggtggtatctatatgttgagattggctgttggttcttcattgaccgaagaacatcatgttagaagagtttgggacttgatccaaaagttgaccgatgacttgttgaaagaagcctga

SEQ ID NO: 26 - protein, 500 aa, Catharanthus roseus
MGSIDSTNVAMSNSPVGEFKPLEAEEFRKQAHRMVDFIADYYKNVETYPVLSEVEPGYLRKRIPETAPYLPEPLDDIMKDIQKDIIPGMTNWMSPNFYAFFPATVSSAAFLGEMLSTALNSVGFTWVSSPAATELEMIVMDWLAQILKLPKSFMFSGTGGGVIQNTTSESILCTIIAARERALEKLGPDSIGKLVCYGSDQTHTMFPKTCKLAGIYPNNIRLIPTTVETDFGISPQVLRKMVEDDVAAGYVPLFLCATLGTTSTTATDPVDSLSEIANEFGIWIHVDAAYAGSACICPEFRHYLDGIERVDSLSLSPHKWLLAYLDCTCLWVKQPHLLLRALTTNPEYLKNKQSDLDKVVDFKNWQIATGRKFRSLKLWLILRSYGVVNLQSHIRSDVAMGKMFEEWVRSDSRFEIVVPRNFSLVCFRLKPDVSSLHVEEVNKKLLDMLNSTGRVYMTHTIVGGIYMLRLAVGSSLTEEHHVRRVWDLIQKLTDDLLKEA

SEQ ID NO: 27 - DNA, 1503 bp, Saccharomyces cerevisiae
atgtctagattagaaagattgacctcattaaacgttgttgctggttctgacttgagaagaacctccatcattggtaccatcggtccaaagaccaacaacccagaaaccttggttgctttgagaaaggctggtttgaacattgtccgtatgaacttctctcacggttcttacgaataccacaagtctgtcattgacaacgccagaaagtccgaagaattgtacccaggtagaccattggccattgctttggacaccaagggtccagaaatcagaactggtaccaccaccaacgatgttgactacccaatcccaccaaaccacgaaatgatcttcaccaccgatgacaagtacgctaaggcttgtgacgacaagatcatgtacgttgactacaagaacatcaccaaggtcatctccgctggtagaatcatctacgttgatgatggtgttttgtctttccaagttttggaagtcgttgacgacaagactttgaaggtcaaggctttgaacgccggtaagatctgttcccacaagggtgtcaacttaccaggtaccgatgtcgatttgccagctttgtctgaaaaggacaaggaagatttgagattcggtgtcaagaacggtgtccacatggtcttcgcttctttcatcagaaccgccaacgatgttttgaccatcagagaagtcttgggtgaacaaggtaaggacgtcaagatcattgtcaagattgaaaaccaacaaggtgttaacaacttcgacgaaatcttgaaggtcactgacggtgttatggttgccagaggtgacttgggtattgaaatcccagccccagaagtcttggctgtccaaaagaaattgattgctaagtctaacttggctggtaagccagttatctgtgctacccaaatgttggaatccatgacttacaacccaagaccaaccagagctgaagtttccgatgtcggtaacgctatcttggatggtgctgactgtgttatgttgtctggtgaaaccgccaagggtaactacccaatcaacgccgttaccactatggctgaaaccgctgtcattgctgaacaagctatcgcttacttgccaaactacgatgacatgagaaactgtactccaaagccaacctccaccaccgaaaccgtcgctgcctccgctgtcgctgctgttttcgaacaaaaggccaaggctatcattgtcttgtccacttccggtaccaccccaagattggtttccaagtacagaccaaactgtccaatcatcttggttaccagatgcccaagagctgctagattctctcacttgtacagaggtgtcttcccattcgttttcgaaaaggaacctgtctctgactggactgatgatgttgaagcccgtatcaacttcggtattgaaaaggctaaggaattcggtatcttgaagaagggtgacacttacgtttccatccaaggtttcaaggccggtgctggtcactccaacactttgcaagtctctaccgtttaa

SEQ ID NO: 28 - protein, 500 aa, Saccharomyces cerevisiae
MSRLERLTSLNVVAGSDLRRTSIIGTIGPKTNNPETLVALRKAGLNIVRMNFSHGSYEYHKSVIDNARKSEELYPGRPLAIALDTKGPEIRTGTTTNDVDYPIPPNHEMIFTTDDKYAKACDDKIMYVDYKNITKVISAGRIIYVDDGVLSFQVLEVVDDKTLKVKALNAGKICSHKGVNLPGTDVDLPALSEKDKEDLRFGVKNGVHMVFASFIRTANDVLTIREVLGEQGKDVKIIVKIENQQGVNNFDEILKVTDGVMVARGDLGIEIPAPEVLAVQKKLIAKSNLAGKPVICATQMLESMTYNPRPTRAEVSDVGNAILDGADCVMLSGETAKGNYPINAVTTMAETAVIAEQAIAYLPNYDDMRNCTPKPTSTTETVAASAVAAVFEQKAKAIIVLSTSGTTPRLVSKYRPNCPIILVTRCPRAARFSHLYRGVFPFVFEKEPVSDWTDDVEARINFGIEKAKEFGILKKGDTYVSIQGFKAGAGHSNTLQVSTV

SEQ ID NO: 29 - DNA, 2964 bp, Saccharomyces cerevisiae
atgcaatctcaagattcatgctacggtgttgcattcagatctatcatcacaaatgatgaagctttattcaagaagaccattcacttttatcacactctaggatttgcaactgtgaaagatttcaacaaattcaaacatggtgaaaatagcttactatcttcagggacttcccaagattccttgagagaagtttggttagaatctttcaagttgagtgaggttgatgcttctgggttccgtataccacaacaagaagctactaacaaggctcaaagtcaaggtgctctattaaagattcgtttagtgatgtctgctccaatcgatgaaactttcgacaccaacgaaaccgccacaatcacttatttctctactgatttgaacaagattgtcgagaaattcccaaaacaagccgaaaaattgtccgataccttagtgtttttgaaagatccaatgggcaacaacatcaccttctcaggcttagctaatgcaaccgattccgctccaacttccaaagatgctttcttagaagctacctccgaagacgaaatcatctctagagcttcttccgatgcttctgacttactaagacaaacattgggctcttctcaaaagaagaagaagattgctgtcatgacttctggtggtgattctccaggtatgaatgccgctgttcgtgccgttgttcgtacaggtatacatttcggctgtgatgtttttgctgtttacgaaggttacgaaggtttactaagaggcggtaaatatttaaagaaaatggcttgggaagatgtcagaggttggttaagtgaaggtggtactttgattggtactgctcgttctatggaattcagaaagcgtgagggtcgtagacaagctgcaggcaatttaatttcgcaaggtattgacgctttggttgtttgtggtggtgatggttctttaaccggtgctgatcttttcagacacgaatggccatctttggttgatgaattggttgcagaaggtagattcactaaagaagaagtcgccccatacaagaatttgtccattgttggtcttgtcggttccatcgataatgatatgtctggtactgactctaccattggtgcttattctgctttggaaagaatctgtgaaatggttgactacattgatgccaccgctaaatcccactcccgtgcctttgttgttgaagttatgggtagacattgtggttggttggccttgatggctggtattgctaccggtgccgattacatttttattccagaaagagctgttcctcacggaaaatggcaggacgaattgaaggaagtgtgccaaagacacagaagtaagggtagaagaaataacacaattattgtcgctgaaggtgctttagatgatcaattaaaccctgttactgccaatgacgtcaaagatgctttgattgaattgggtctagacaccaaggtaaccattctaggtcacgttcaaagaggtggtacagctgttgctcatgacagatggttagctactctacaaggtgtcgatgctgttaaggccgttctggaatttacccctgaaactccttctccattaattggtattttagaaaacaagataattagaatgccattggttgaatctgtgaagttgactaaatctgttgccactgccattgaaaacaaagatttcgataaggcaatttctttaagagacacagaatttattgaactttacgaaaacttcttatccactaccgttaaagatgatggttccgaattattgccagtatctgacagactaaacattggtattgtccatgttggtgccccatctgctgctttgaacgctgccacccgtgccgcaactctatactgtttgtctcacggccataaaccatacgctatcatgaatggtttcagtggattgattcaaaccggtgaagtgaaggaactatcatggattgatgtcgaaaactggcataacttgggtggttccgaaatcggtacgaacagatctgttgcttcagaagatttgggtaccattgcttactacttccaaaagaacaagctagacggtttgattattcttggtggttttgaaggtttcaggtccttgaagcaattgcgtgacggtagaacccaacacccaatctttaacattccaatgtgtttgattccagccactgtttctaacaacgttccaggtactgaatactcacttggtgttgatacctgtttgaacgcattagtcaattacactgatgacatcaaacagagtgcttctgcgacaagaagaagagtcttcgtctgtgaagtccaaggtggtcactctggttacatcgcttctttcactggtttaatcactggtgctgtttcagtgtacactccagaaaagaagatcgacttagcttctatcagagaagatataactctattaaaagagaactttcgtcacgacaaaggtgaaaacagaaacggtaagctattggttagaaacgaacaagcttctagcgtatatagcactcaattgttggctgacatcatctctgaagcaagcaagggtaagtttggtgttagaactgctatcccaggccatgttcaacaaggtggtgttccatcttctaaagaccgtgtcaccgcttccagatttgctgtcaaatgtatcaagtttatcgaacaatggaacaagaaaaatgaagcttctccaaacactgacgctaaggttttgagattcaagttcgatactcacggtgaaaaggtaccaactgttgagcacgaagatgactctgctgctgttatctgtgttaatggttctcacgtttccttcaagccaattgctaacctttgggaaaacgaaaccaacgttgaattaagaaagggttttgaagttcactgggctgaatacaacaagattggtgacatcctgtccggtagattaaagttgagagctgaggtagccgctttagccgctgaaaacaaatga

SEQ ID NO: 30 - protein, 987 aa, Saccharomyces cerevisiae
MQSQDSCYGVAFRSIITNDEALFKKTIHFYHTLGFATVKDFNKFKHGENSLLSSGTSQDSLREVWLESFKLSEVDASGFRIPQQEATNKAQSQGALLKIRLVMSAPIDETFDTNETATITYFSTDLNKIVEKFPKQAEKLSDTLVFLKDPMGNNITFSGLANATDSAPTSKDAFLEATSEDEIISRASSDASDLLRQTLGSSQKKKKIAVMTSGGDSPGMNAAVRAVVRTGIHFGCDVFAVYEGYEGLLRGGKYLKKMAWEDVRGWLSEGGTLIGTARSMEFRKREGRRQAAGNLISQGIDALVVCGGDGSLTGADLFRHEWPSLVDELVAEGRFTKEEVAPYKNLSIVGLVGSIDNDMSGTDSTIGAYSALERICEMVDYIDATAKSHSRAFVVEVMGRHCGWLALMAGIATGADYIFIPERAVPHGKWQDELKEVCQRHRSKGRRNNTIIVAEGALDDQLNPVTANDVKDALIELGLDTKVTILGHVQRGGTAVAHDRWLATLQGVDAVKAVLEFTPETPSPLIGILENKIIRMPLVESVKLTKSVATAIENKDFDKAISLRDTEFIELYENFLSTTVKDDGSELLPVSDRLNIGIVHVGAPSAALNAATRAATLYCLSHGHKPYAIMNGFSGLIQTGEVKELSWIDVENWHNLGGSEIGTNRSVASEDLGTIAYYFQKNKLDGLIILGGFEGFRSLKQLRDGRTQHPIFNIPMCLIPATVSNNVPGTEYSLGVDTCLNALVNYTDDIKQSASATRRRVFVCEVQGGHSGYIASFTGLITGAVSVYTPEKKIDLASIREDITLLKENFRHDKGENRNGKLLVRNEQASSVYSTQLLADIISEASKGKFGVRTAIPGHVQQGGVPSSKDRVTASRFAVKCIKFIEQWNKKNEASPNTDAKVLRFKFDTHGEKVPTVEHEDDSAAVICVNGSHVSFKPIANLWENETNVELRKGFEVHWAEYNKIGDILSGRLKLRAEVAALAAENK

SEQ ID NO: 31 - DNA, 2880 bp, Saccharomyces cerevisiae
atgactgttactactccttttgtgaatggtacttcttattgtaccgtcactgcatattccgttcaatcttataaagctgccatagatttttacaccaagtttttgtcattagaaaaccgctcttctccagatgaaaactccactttattgtctaacgattccatctctttgaagatccttctacgtcctgatgaaaaaatcaataaaaatgttgaggctcatttgaaggaattgaacagtattaccaagactcaagactggagatcacatgccacccaatccttggtatttaacacttccgacatcttggcagtcaaggacactctaaatgctatgaacgctcctcttcaaggctacccaacagaactatttccaatgcagttgtacactttggacccattaggtaacgttgttggtgttacttctactaagaacgcagtttcaaccaagccaactccaccaccagcaccagaagcttctgctgagtctggtctttcctctaaagttcactcttacactgatttggcttaccgtatgaaaaccaccgacacctatccatctctgccaaagccattgaacaggcctcaaaaggcaattgccgtcatgacttccggtggtgatgctccaggtatgaactctaacgttagagccatcgtgcgttccgctatcttcaaaggttgtcgtgcctttgttgtcatggaaggttatgaaggtttggttcgtggtggtccagaatacatcaaggaattccactgggaagacgtccgtggttggtctgctgaaggtggtaccaacattggtactgcccgttgtatggaattcaagaagcgcgaaggtagattattgggtgcccaacatttgattgaggccggtgtcgatgctttgatcgtttgtggtggtgacggttctttgactggtgctgatctgtttagatcagaatggccttctttgatcgaggaattgttgaaaacaaacagaatttccaacgaacaatacgaaagaatgaagcatttgaatatttgcggtactgtcggttctattgataacgatatgtccaccacggatgctactattggtgcttactctgccttggacagaatctgtaaggccatcgattacgttgaagccactgccaactctcactcaagagctttcgttgttgaagttatgggtagaaactgtggttggttagctttattagctggtatcgccacttccgctgactatatctttattccagagaagccagccacttccagcgaatggcaagatcaaatgtgtgacattgtctccaagcacagatcaaggggtaagagaaccaccattgttgttgttgcagaaggtgctatcgctgctgacttgaccccaatttctccaagcgacgtccacaaagttctagttgacagattaggtttggatacaagaattactaccttaggtcacgttcaaagaggtggtactgctgttgcttacgaccgtatcttggctactttacaaggtcttgaggccgttaatgccgttttggaatccactccagacaccccatcaccattgattgctgttaacgaaaacaaaattgttcgtaaaccattaatggaatccgtcaagttgaccaaagcagttgcagaagccattcaagctaaggatttcaagagagctatgtctttaagagacactgagttcattgaacatttaaacaatttcatggctatcaactctgctgaccacaacgaaccaaagctaccaaaggacaagagactgaagattgccattgttaatgtcggtgctccagctggtggtatcaactctgccgtctactcgatggctacttactgtatgtcccaaggtcacagaccatacgctatctacaatggttggtctggtttggcaagacatgaaagtgttcgttctttgaactggaaggatatgttgggttggcaatcccgtggtggttctgaaatcggtactaacagagtcactccagaagaagcagatctaggtatgattgcttactatttccaaaagtacgaatttgatggtttgatcatcgttggtggtttcgaagcttttgaatctttacatcaattagagagagcaagagaaagttatccagctttcagaatcccaatggtcttgataccagctactttgtctaacaatgttccaggtactgaatactctttgggttctgataccgctttgaatgctctaatggaatactgtgatgttgttaaacaatccgcttcttcaaccagaggtagagccttcgttgtcgattgtcaaggtggtaactcaggctatttggccacttacgcttctttggctgttggtgctcaagtctcttatgtcccagaagaaggtatttctttggagcaattgtccgaggatattgaatacttagctcaatcttttgaaaaggcagaaggtagaggtagatttggtaaattgattttgaagagtacaaacgcttctaaggctttatcagccactaaattggctgaagttattactgctgaagccgatggcagatttgacgctaagccagcttatccaggtcatgtacaacaaggtggtttgccatctccaattgatagaacaagagccactagaatggccattaaagctgtcggcttcatcaaagacaaccaagctgccattgctgaagctcgtgctgccgaagaaaacttcaacgctgatgacaagaccatttctgacactgctgctgtcgttggtgttaagggttcacatgtcgtttacaactccattagacaattgtatgactatgaaactgaagtttccatgagaatgccaaaggtcattcactggcaagctaccagactcattgctgaccatttggttggaagaaagagagttgattaa

SEQ ID NO: 32 - protein, 959 aa, Saccharomyces cerevisiae
MTVTTPFVNGTSYCTVTAYSVQSYKAAIDFYTKFLSLENRSSPDENSTLLSNDSISLKILLRPDEKINKNVEAHLKELNSITKTQDWRSHATQSLVFNTSDILAVKDTLNAMNAPLQGYPTELFPMQLYTLDPLGNVVGVTSTKNAVSTKPTPPPAPEASAESGLSSKVHSYTDLAYRMKTTDTYPSLPKPLNRPQKAIAVMTSGGDAPGMNSNVRAIVRSAIFKGCRAFVVMEGYEGLVRGGPEYIKEFHWEDVRGWSAEGGTNIGTARCMEFKKREGRLLGAQHLIEAGVDALIVCGGDGSLTGADLFRSEWPSLIEELLKTNRISNEQYERMKHLNICGTVGSIDNDMSTTDATIGAYSALDRICKAIDYVEATANSHSRAFVVEVMGRNCGWLALLAGIATSADYIFIPEKPATSSEWQDQMCDIVSKHRSRGKRTTIVVVAEGAIAADLTPISPSDVHKVLVDRLGLDTRITTLGHVQRGGTAVAYDRILATLQGLEAVNAVLESTPDTPSPLIAVNENKIVRKPLMESVKLTKAVAEAIQAKDFKRAMSLRDTEFIEHLNNFMAINSADHNEPKLPKDKRLKIAIVNVGAPAGGINSAVYSMATYCMSQGHRPYAIYNGWSGLARHESVRSLNWKDMLGWQSRGGSEIGTNRVTPEEADLGMIAYYFQKYEFDGLIIVGGFEAFESLHQLERARESYPAFRIPMVLIPATLSNNVPGTEYSLGSDTALNALMEYCDVVKQSASSTRGRAFVVDCQGGNSGYLATYASLAVGAQVSYVPEEGISLEQLSEDIEYLAQSFEKAEGRGRFGKLILKSTNASKALSATKLAEVITAEADGRFDAKPAYPGHVQQGGLPSPIDRTRATRMAIKAVGFIKDNQAAIAEARAAEENFNADDKTISDTAAVVGVKGSHVVYNSIRQLYDYETEVSMRMPKVIHWQATRLIADHLVGRKRVD

SEQ ID NO: 33 - DNA, 3171 bp, Saccharomyces cerevisiae
atgttcatcaaacagtctgaaaaaaatacacctaaatgcctctacaaaaaaaaaggtaaggtaagagtgttattgaccggaagctgtaagaaactgaacacgtggaaaatgcacttatggccagtcagtccgccccaattgcttagaattccaccccgcaacgccgaattaggtgagggtactaaaatagatgattgcaatattcttcaatcaatgacactaccccaggccaatgttcttatcatgctaaccccaacaagagtgctcatttacaacttcaaaccaatggcactagtagctagccatgaacgaacaatggcttctcttaaggaatttggcgataacagatcaatgaaacgatcagctccatataatgatatcatcgaagggcttatttcaaaaaaggactcgcaatacttattgtggcaccagggaaagctgatattttacgtaatgactgataaaaacttccttttaacataccaaattttaaaaaactgcacaaatgaaataattttcaaagaatacggcatacccgtcatagagcctcttttaatgagtgaagaagaagcgaacagtgctgaatatgactataacaacgatgatgatactctcacggtatttgataaaaatagttcttcaagaattatacagaatggatttggcataactaaggaaaaagggtttttacactttctttctaatcaagaaaacattgatgaactccccgtgaaaaaactagaacttcgtttaaaagtagttcttaaatttgactatgaaatcatagacatgattggcatcaagacattttccaaagtcggggatgggcgttatgaagaagttttgatagttttattccctcatggattacaaatacttacaatatcggattttaaagttagcaagagctcgttggttgaagtgaagaagggatccaagacaattgtgtgtaataaacaattaatggttttatctcatgattccgtcgaaaagcagactattgtaagcattatagacattgaaaagcaagctgttgaagcaataccgttaacggacacaccagatgaacttttgacttgcctagaagttaatggatacctggtggtcgtttacaaagaaaaaataatctgctttgatacaagaattaaaaaagtaagccattcttggaaaccaccatttgtgataaaactttgcgataaaattaatgataaaatattacttttggtttctgaggatagtgttaacattcatttttacacagaatttgggaatctgctattcgctacatattttgacgaagatgattataatggtgataacaataatgacaacagcaaggataaaaatgagaaaaaggcggctgaatataaaatttctgattttgtatgcttggataaatcactaataacagtgtctcattccggaaaatatcaagtttggaaattatgggaagaaataaaacaaacacaatttgatttcagaaacccaaaatgttacgtattaaccaatacgaacaatgatgtaatcatatattcacctgtgacaagttcttcaatcaataatgataatttacaagtcataaaacttcctacaaagactttcaataatcatattgcttttgtaaaaattaattcttccttgaggttatttgctacttatgtgtcgaacaaaaacatactgcttatccacaatctagagaccaatatgtggtctagttttgctgaccaaaacgtgttggatttacattggctaggtgataattatttggtttgtcatatgaagaatgatgatggctcaacaaatctgaaatgtctgcagattccactgcaagaagcgaatccggacgtggaactatcagattatgtcatgtgggaatacaatgttccagagaatacgattgttttcagtttacatgttaatactttatcccggtataagttgttgaaaatgaaatccaagaatcacaatgcttctgaaaaacaacctgatgcattgcttaaaactgccgagattattttagttactgatacacagacaattgtcttcgatgtaatttctactgtacatccatgtggattaaacatcatcaaaaaattctaccagtatctcaaaattaacattccaattgatgttttacccaacaaaattgagtggataattaacatgaaggagggcttgttattttttgccgataggaaatttataaagcttggcaaagtggatggagggggctggcaaaccttaactttgttggataacatagaaaaaataatcgatgttatcagggacgaaatatttgtagttcaaggccataattacgtcgtatactctttggaagatttatgggatgataaaaagccactagtttccattccaatcgaagaagatttgtatccaatatcaaccaccccagaaacagctacaacacatacacttcactgcatttttaacgcgcgattttccaaattggtggtgaaacaccaaatatacctcgaccaattaatcttagccaaattagaagacaacacagatttggaggatatttcacacaattatcgttttttaaagccttacaaatttgcactcgaaaagattttgtctactaaaatactgcgaagcgactctttggatgatatcctgaaattaattaagatgtatgacaacaccgatcctgagcataatatttcaccaccaacccacagtggtatgttagaaattattagtaattgtttaaggaagatcgaaactaaatactggaaccatctattcactaatctaaagatgacaccaagagatttattagcactctgtatcgaagaaaatgaggctaaaatgcttggcgtacttctgttagtgtttttaaattacgatgagaaagatttgggagatgatctacattttaagaaatcagatttagggactgaggaaagcaaagctctaaatgataactctacaaaaaagtcagagaaatctgtcactaatttattgaaggatgaagaattaatgcttaaagtcttagagcttttggtgacaagtgctgcaaacgccacagacccaattaaagctaccgattcgtgggacatgtgtttccaattaatacgcttactcaaggaattagacagagaaaacaacacacaattggttcaaaaagcactcgagagattcaaataa

SEQ ID NO: 34 - DNA, 753 bp, Saccharomyces cerevisiae
atgcctttgaccacaaaacctttatctttgaaaatcaacgccgctctattcgatgttgacggtaccatcatcatctctcaaccagccattgctgctttctggagagatttcggtaaagacaagccttacttcgatgccgaacacgttattcacatctctcacggttggagaacttacgatgccattgccaagttcgctccagactttgctgatgaagaatacgttaacaagctagaaggtgaaatcccagaaaagtacggtgaacactccatcgaagttccaggtgctgtcaagttgtgtaatgctttgaacgccttgccaaaggaaaaatgggctgtcgccacctctggtacccgtgacatggccaagaaatggttcgacattttgaagatcaagagaccagaatacttcatcaccgccaatgatgtcaagcaaggtaagcctcacccagaaccatacttaaagggtagaaacggtttgggtttcccaattaatgaacaagacccatccaaatctaaggttgttgtctttgaagacgcaccagctggtattgctgctggtaaggctgctggctgtaaaatcgttggtattgctaccactttcgatttggacttcttgaaggaaaagggttgtgacatcattgtcaagaaccacgaatctatcagagtcggtgaatacaacgctgaaaccgatgaagtcgaattgatctttgatgactacttatacgctaaggatgacttgttgaaatggtaa

SEQ ID NO: 35 - DNA, 1023 bp, Saccharomyces cerevisiae
atgaacaacacttccataaccggaccacaagtactacatagaacaaaaatgagaccactaccagtgctagaaaaatactgtatctcgccacatcatgggtttttggacgaccggttacccttgaccagactgagcagcaagaaatatatgaaatgggaagaaatcgttgctgacctgccctctcttttgcaagaggataacaaggtgcggagcgtcatcgatgggctggatgtcttggacttggatgagacgatcttgggcgacgtcagggagctcagaagagcatattccattttggggtttatggcgcacgcttatatttgggccagcggaactccccgggatgtattaccggagtgtattgcaaggccactgttggagacagcacatattttgggtgtgccaccgttagctacgtactcctcgttggtgttatggaacttcaaagtgaccgacgagtgcaagaaaacggaaaccgggtgtttggacttggaaaatattacaacgataaacacatttacgggaaccgttgacgaaagttggttttatctggtcagcgtgcggtttgaaaaaatcggcagcgcttgtttaaaccatgggttgcagatattgagagccattagaagcggtgataaaggagacgctaacgtgatagacgggttggagggcttggctgcaacgatcgaaaggttatcgaaagccttgatggaaatggagcttaagtgtgaacccaatgtattttatttcaagataagaccatttttggccgggtggacgaatatgtcgcatatggggttaccacagggtgttaggtatggagcggaaggacagtatcggatcttttctggcgggtccaatgcgcaaagctcgttgatacagacactggacatccttttgggtgtgaaacacactgcgaatgctgcgcattcttcccaaggagacagcaagatcaattatctggacgaaatgaaaaaatacatgccaagagaacatcgtgaatttctttaccatttggaatcggta

SEQ ID NO: 36 - DNA, 1023 bp, Saccharomyces cerevisiae
atgactaaatctgagcagcaagccgattcaagacataacgttatcgacttagttggtaacaccccattgatcgcactgaaaaaattgcctaaggctttgggtatcaaaccacaaatttatgctaagctggaactatacaatccaggtggttccatcaaagacagaattgccaagtctatggtggaagaagctgaagcttccggtagaattcatccttccagatctactctgatcgaacctacttctggtaacaccggtatcggtctagctttaatcggcgccatcaaaggttacagaactatcatcaccttgccggaaaaaatgtctaacgagaaagtttctgtcctaaaggctctgggtgctgaaatcatcagaactccaactgctgctgcctgggattctccagaatcacatattggtgttgctaagaagttggaaaaagagattcctggtgctgttatacttgaccaatataacaatatgatgaacccagaagctcattactttggtactggtcgcgaaatccaaagacagctagaagacttgaatttatttgataatctacgcgctgttgttgctggtgctggtactggtgggactattagcggtatttccaagtacttgaaagaacagaatgataagatccaaatcgttggtgctgacccattcggttcaattttagcccaacctgaaaacttgaataagactgatatcactgactacaaagttgagggtattggttatgattttgttcctcaggttttggacagaaaattaattgatgtttggtataagacagacgacaagccttctttcaaatacgccagacaattgatttctaacgaaggtgtcttggtgggtggttcttccggttctgccttcactgcggttgtgaaatactgtgaagaccaccctgaactgactgaagatgatgtcattgttgccatattcccagattccatcaggtcgtacctaaccaaattcgtcgatgacgaatggttgaaaaagaacaatttgtgggat

SEQ ID NO: 37 - DNA, 1023 bp, Saccharomyces cerevisiae
atggcacctgttacaattgaaaagttcgtaaatcaagaagaacgacaccttgtttccaaccgatcagcaacaattccgtttggtgaatacatatttaaaagattgttgtccatcgatacgaaatcagttttcggtgttcctggtgacttcaacttatctctattagaatatctctattcacctagtgttgaatcagctggcctaagatgggtcggcacgtgtaatgaactgaacgccgcttatgcggccgacggatattcccgttactctaataagattggctgtttaataaccacgtatggcgttggtgaattaagcgccttgaacggtatagccggttcgttcgctgaaaatgtcaaagttttgcacattgttggtgtggccaagtccatagattcgcgttcaagtaactttagtgatcggaacctacatcatttggtcccacagctacatgattcaaattttaaagggccaaatcataaagtatatcatgatatggtaaaagatagagtcgcttgctcggtagcctacttggaggatattgaaactgcatgtgaccaagtcgataatgttatccgcgatatttacaagtattctaaacctggttatatttttgttcctgcagattttgcggatatgtctgttacatgtgataatttggttaatgttccacgtatatctcaacaagattgtatagtatacccttctgaaaaccaattgtctgacataatcaacaagattactagttggatatattccagtaaaacacctgcgatccttggagacgtactgactgataggtatggtgtgagtaactttttgaacaagcttatctgcaaaactgggatttggaatttttccactgttatgggaaaatctgtaattgatgagtcaaacccaacttatatgggtcaatataatggtaaagaaggtttaaaacaagtctatgaacattttgaactgtgcgacttggtcttgcattttggagtcgacatcaatgaaattaataatgggcattatact

SEQ ID NO: 38 - DNA, 1023 bp, Saccharomyces cerevisiae
atgtctgaaataaccttaggtaaatatttatttgaaagattgagccaagtcaactgtaacaccgtcttcggtttgccaggtgactttaacttgtctcttttggataagctttatgaagtcaaaggtatgagatgggctggtaacgctaacgaattgaacgctgcctatgctgctgatggttacgctcgtatcaagggtatgtcctgtattattaccaccttcggtgttggtgaattgtctgctttgaatggtattgccggttcttacgctgaacatgtcggtgttttgcacgttgttggtgttccatccatctcttctcaagctaagcaattgttgttgcatcataccttgggtaacggtgacttcactgttttccacagaatgtctgccaacatttctgaaaccactgccatgatcactgatattgctaacgctccagctgaaattgacagatgtatcagaaccacctacactacccaaagaccagtctacttgggtttgccagctaacttggttgacttgaacgtcccagccaagttattggaaactccaattgacttgtctttgaagccaaacgacgctgaagctgaagctgaagttgttagaactgttgttgaattgatcaaggatgctaagaacccagttatcttggctgatgcttgtgcttctagacatgatgtcaaggctgaaactaagaagttgatggacttgactcaattcccagtttacgtcaccccaatgggtaagggtgctattgacgaacaacacccaagatacggtggtgtttacgttggtaccttgtctagaccagaagttaagaaggctgtagaatctgctgatttgatattgtctatcggtgctttgttgtctgatttcaataccggttctttctcttactcctacaagaccaaaaatatcgttgaattccactctgaccacatcaagatcagaaacgccaccttcccaggtgttcaaatgaaatttgccttgcaaaaattgttggatgctattccagaagtcgtc

SEQ ID NO: 39 - DNA, 405 bp, Saccharomyces cerevisiae
atgtcaggaaaagctcatggaggtaaaggtaaatccggcgctaaagacagtggttcattgagatctcaatcttcttcagcaagggctggcttgcagtttcctgtcggtaggattaagcgttacctgaaaaggcacgctaccggccgaacaagagtaggatccaaagctgccatttatttgactgctgtgttggaatatttgactgctgaagtgctggagttggctggtaatgcagccaaggatcttaaagtcaagaggattaccccaagacatctgcaattggccattagaggtgacgatgagttagattctttgatcagggctacaattgcttcaggtggtgttttgcctcatataaataaagcattattattgaaagtggaaaaaaagggaagtaagaaataa

SEQ ID NO: 40 - DNA, 1023 bp, Saccharomyces cerevisiae
atggtgaagcccgttatttttgccatttgtttaggtgttctattatctaaggcactctccatcccactcagaagttttgcggatattgaactaattggctctcagaagagtctgtttccctttcttggagggtctgcgccatatttctcctttcccgctaactacggtatacccactgatattcctgaaggttgtagattaacgcaagttcaaatgattggcagacatggcgaaaggtatcctaccagaagtgaggccaaggatatttttgaagtatggtataaaatatccaattacacaggtaagtacgagggatcattatcgtttttgaataatggatatgaattttttattcccgatgaaagtcttctagaaatggagacaactttgcaaaattcgattgatgtgttgaacccgtatacaggagaaatgaatgcaaagagacatgcaagggagtttttagcaaaatatggaaaattgatggagaactgtaccaactttcctatcttcaccacaaattcgaaaagaatctacgatactgcgcaatattttgccgaggctttgggcgatggctttaatatatcacttcaaacacttagcgaaaattcctcgtcaggagcaaacacattagctgccaaaagttcgtgccccaattggaattcgaatgccaacaatgatatattaatgtcatattcgagggactacttagaaaatatttccgatcgtcttaatgacgaaaataaagggctgaacttgagcaggaaagatgcagcggccttgttttcttggtgtgccttcgagttgaacgcaaaaggttatagtaacatttgtgacattttctccgcggcagagttaatacattattcttatgagactgatttgacgagcttctaccaaaatggtcccggatacaaattgattaaatctataggtgctaatttgttcaatgcaacagtgaagctaatacgacaaagtgcgcacttggaccaaaaagtttggctgagctttacgcacgatactgat

SEQ ID NO: 41 - DNA, 1023 bp, Saccharomyces cerevisiae
atgtttaaatctgttgtttattcaattttagccgcttctttggccaatgcaggtaccattcccttaggcaaactagccgatgtcgacaagattggtacccaaaaagatatcttcccatttttgggtggtgccggaccatactactctttccctggcgactatggtatttctcgtgatttgcctgaaggttgtgaaatgaagcaactgcaaatggttggtagacatggtgaaagataccctactgtcagtctggctaagactatcaagagtacatggtataagttgagcaattacactcgtcaattcaacggctcattgtcattcttgaacgatgattacgagtttttcatccgtgatgacgatgatttggaaatggaaaccacttttgccaactcggacgatgttttgaacccatacactggtgaaatgaacgccaagagacatgctcgtgacttcttggctcaatacggttacatggtcgaaaaccaaaccagtttcgccgtttttacctctaattctaagagatgtcatgacactgctcaatatttcattgatggtttaggtgaccaattcaacatcaccttgcagactgtcagtgaagctgaatccgctggtgccaacactttgagtgcttgtaactcatgtcctgcttgggactacgatgccaatgatgacattgtaaatgaatacgacacaacctacttggatgacattgccaagagattgaacaaggaaaacaagggtttgaacttgacctcaactgacgctagtactttattctcgtggtgtgcatttgaagtgaacgctaaaggttacagtgatgtctgtgatattttcaccaaggatgaattagtccattactcctactaccaagacttgcacacttattaccatgagggtccaggttacgacattatcaagtctgtcggttccaacttgttcaatgcctcagtcaaattattaaagcaaagtgagattcaagaccaaaaggtttggttgagttttacccacgataccgatatc

SEQ ID NO: 42 - DNA, 1023 bp, Saccharomyces cerevisiae
atgttgaagtcagccgtttattcaattttagccgcttctttggttaatgcaggtaccatacccctcggaaagttatctgacattgacaaaatcggaactcaaacggaaattttcccatttttgggtggttctgggccatactactctttccctggtgattatggtatttctcgtgatttgccggaaagttgtgaaatgaagcaagtgcaaatggttggtagacacggtgaaagataccccactgtcagcaaagccaaaagtatcatgacaacgtggtacaaattgagtaactataccggtcaattcagcggagcattgtctttcttgaacgatgactacgaatttttcattcgtgacaccaaaaacctagaaatggaaaccacacttgccaattcggtcaatgttttgaacccatataccggtgagatgaatgctaagagacacgctcgtgatttcttggcgcaatatggctacatggtcgaaaaccaaaccagttttgccgtttttacgtctaactcgaacagatgtcatgatactgcccagtatttcattgacggtttgggtgataaattcaacatatccttgcaaaccatcagtgaagccgagtctgctggtgccaatactctgagtgcccaccattcgtgtcctgcttgggacgatgatgtcaacgatgacattttgaaaaaatatgataccaaatatttgagtggtattgccaagagattaaacaaggaaaacaagggtttgaatctgacttcaagtgatgcaaacactttttttgcatggtgtgcatatgaaataaacgctagaggttacagtgacatctgtaacatcttcaccaaagatgaattggtccgtttctcctacggccaagacttggaaacttattatcaaacgggaccaggctatgacgtcgtcagatccgtcggtgccaacttgttcaacgcttcagtgaaactactaaaggaaagtgaggtccaggaccaaaaggtttggttgagtttcacccacgataccgatatt

SEQ ID NO: 43 - DNA, 1023 bp, Saccharomyces cerevisiae
atgttgaagtcagccgtttattcaattttagccgcttctttggttaatgcaggtaccatacccctcggaaagttatctgacattgacaaaatcggaactcaaacggaaattttcccatttttgggtggttctgggccatactactctttccctggtgattatggtatttctcgtgatttgccggaaagttgtgaaatgaagcaagtgcaaatggttggtagacacggtgaaagataccccactgtcagcaaagccaaaagtatcatgacaacatggtacaaattgagtaactataccggtcaattcagcggagcattgtctttcttgaacgatgactacgaatttttcattcgtgacaccaaaaacctagaaatggaaaccacacttgccaattcggtcaatgttttgaacccatataccggtgagatgaatgctaagagacacgctcgtgatttcttggcgcaatatggctacatggtcgaaaaccaaaccagttttgccgtttttacgtctaactcgaacagatgtcatgatactgcccagtatttcattgacggtttgggtgataaattcaacatatccttgcaaaccatcagtgaagccgagtctgctggtgccaatactctgagtgcccaccattcgtgtcctgcttgggacgatgatgtcaacgatgacattttgaaaaaatatgataccaaatatttgagtggtattgccaagagattaaacaaggaaaacaagggtttgaatctgacttcaagtgatgcaaacactttttttgcatggtgtgcatatgaaataaacgctagaggttacagtgacatctgtaacatcttcaccaaagatgaattggtccgtttctcctacggccaagacttggaaacttattatcaaacgggaccaggctatgacgtcgtcagatccgtcggtgccaacttgttcaacgcttcagtgaaactactaaaggaaagtgaggtccaggaccaaaaggtttggttgagtttcacccacgataccgatatt

SEQ ID NO: 44 - DNA, 1023 bp, Saccharomyces cerevisiae
atgtttaagtctgttgtttattcggttctagccgctgctttagttaatgcaggtacaattcccctcggagagttagccgatgttgccaaaattggcactcaggaagacatattcccattcctgggtggtgccgggccatacttctctttccctggcgactatggtatttctcgtgacttgcctgaaggttgtgaaatgaaacaattgcaaatgcttgccagacatggtgaaagatacccaacttacagtaaaggtgctaccatcatgaaaacatggtataagttgagcaattacacacgtcaattcaacggctcattgtcattcttgaacgatgattacgagtttttcatccgtgatgacgatgatttggaaatggaaaccacttttgccaactcagacaatgttttgaatccatacactggtgagatggatgctaagagacatgctcgtgagtttttagcgcaatatggctacatgttcgaaaatcaaaccagtttcccaattttcgccgctagttctgaaagggttcatgacactgctcaatatttcattgatggtttaggtgaccaattcaacatctccttgcagactgtcagtgaagccatgtccgccggcgcaaacactttgagtgctggtaatgcgtgcccaggatgggatgaagatgctaacgatgacattttggacaaatacgataccacatacttggatgacattgccaagagattaaacaaagaaaacaagggtttgaatttgacctcaaaggacgccaacactttgtttgcatggtgtgcatacgaattgaacgctagaggctacagtgatgtttgtgatatcttcaccgaagatgaattggtacgttactcatacggccaggacctggtatcgttttaccaggatggaccaggttatgatatgatcagatccgtcggtgccaacttgtttaacgctactttgaagttgttaaagcaaagtgaaactcaagacttaaaagtctggttgagttttacccacgataccgatatc

SEQ ID NO: 45 - DNA, 771 bp, Saccharomyces cerevisiae
atggatttcacaaaaccagaaactgttttaaatctacaaaatattagagatgaattagttagaatggaggattcgatcatcttcaaatttattgagaggtcgcatttcgccacatgtccttcagtttatgaggcaaaccatccaggtttagaaattccgaattttaaaggatctttcttggattgggctctttcaaatcttgaaattgcgcattctcgcatcagaagattcgaatcacctgatgaaactcccttctttcctgacaagattcagaaatcattcttaccgagcattaactacccacaaattttggcgccttatgccccagaagttaattacaatgataaaataaaaaaagtttatattgaaaagattataccattaatttcgaaaagagatggtgatgataagaataacttctcttctgttgccactagagatatagaatgtttgcaaagcttgagtaggagaatccactttggcaagtttgttgctgaagccaagttccaatcggatatcccgctatacacaaagctgatcaaaagtaaagatgtcgaggggataatgaagaatatcaccaattctgccgttgaagaaaagattctagaaagattaactaagaaggctgaagtctatggtgtggaccctaccaacgagtcaggtgaaagaaggattactccagaatatttggtaaaaatttataaggaaattgttatacctatcactaaggaagttgaggtggaatacttgctaagaaggttggaagagtaa

SEQ ID NO: 46 - protein, 256 aa, Saccharomyces cerevisiae
MDFTKPETVLNLQNIRDELVRMEDSIIFKFIERSHFATCPSVYEANHPGLEIPNFKGSFLDWALSNLEIAHSRIRRFESPDETPFFPDKIQKSFLPSINYPQILAPYAPEVNYNDKIKKVYIEKIIPLISKRDGDDKNNFSSVATRDIECLQSLSRRIHFGKFVAEAKFQSDIPLYTKLIKSKDVEGIMKNITNSAVEEKILERLTKKAEVYGVDPTNESGERRITPEYLVKIYKEIVIPITKEVEVEYLLRRLEE

SEQ ID NO: 47 - DNA, 1005 bp, Saccharomyces cerevisiae
atggccagcaagactttgagggttctttttctgggtcccaaaggtacgtattcccatcaagctgcattacaacaatttcaatcaacatctgatgttgagtacctcccagcagcctctatcccccaatgttttaaccaattggagaacgacactagtatagattattcagtggtaccgttggaaaattccaccaatggacaagtagttttttcctatgatctcttgcgtgataggatgatcaaaaaagccctatccttacctgctccagcagatactaatagaattacaccagatatagaagttatagcggagcaatatgtacccattacccattgtctaatcagcccaatccaactaccaaatggtattgcatcccttggaaattttgaagaagtcataatacactcacatccgcaagtatggggccaggttgaatgttacttaaggtccatggcagaaaaatttccgcaggtcacctttataagattggattgttcttccacatctgaatcagtgaaccaatgcattcggtcatcaacggccgattgcgacaacattctgcatttagccattgctagtgaaacagctgcccaattgcataaggcgtacatcattgaacattcgataaatgataagctaggaaatacaacaagatttttagtattgaagagaagggagaacgcaggcgacaatgaagtagaagacactggattactacgggttaacctactcacctttactactcgtcaagatgaccctggttctttggtagatgttttgaacatactaaaaatccattcactcaacatgtgttctataaactctagaccattccatttggacgaacatgatagaaactggcgatatttatttttcattgaatattacaccgagaagaataccccaaagaataaagaaaaattctatgaagatatcagcgacaaaagtaaacagtggtgcctgtggggtacattccccagaaatgagagatattatcacaaataa

SEQ ID NO: 48 - protein, 334 aa, Saccharomyces cerevisiae
MASKTLRVLFLGPKGTYSHQAALQQFQSTSDVEYLPAASIPQCFNQLENDTSIDYSVVPLENSTNGQVVFSYDLLRDRMIKKALSLPAPADTNRITPDIEVIAEQYVPITHCLISPIQLPNGIASLGNFEEVIIHSHPQVWGQVECYLRSMAEKFPQVTFIRLDCSSTSESVNQCIRSSTADCDNILHLAIASETAAQLHKAYIIEHSINDKLGNTTRFLVLKRRENAGDNEVEDTGLLRVNLLTFTTRQDDPGSLVDVLNILKIHSLNMCSINSRPFHLDEHDRNWRYLFFIEYYTEKNTPKNKEKFYEDISDKSKQWCLWGTFPRNERYYHK

SEQ ID NO: 49 - DNA, 1503 bp, Saccharomyces cerevisiae
atgactttacctgaatcaaaagacttttcttacttgttttcggatgaaaccaatgctcgtaaaccatccccattgaaaacctgcatccatcttttccaagatcctaacattatctttttgggtggtggcctgccattaaaagattatttcccatgggataatctatctgtagattcacccaagcctccttttccccagggtattggagctccaattgacgagcagaattgcataaaatacaccgtcaacaaagattacgctgataaaagtgccaatccttccaacgatattcctttgtcaagagctttgcaatacgggttcagtgctggtcaacctgaactattaaacttcattagagatcataccaagattatccacgatttgaagtataaggactgggacgttttagccactgcaggtaacacaaatgcctgggaatctactttaagagtcttttgtaaccgaggtgatgtcatcttagttgaggcacattctttttcctcttcattggcttctgcagaggctcaaggtgtcattaccttccccgtgccaattgacgctgatggtatcattcctgaaaaattagctaaagtcatggaaaactggacacctggtgctcctaaaccaaagttgttatacactattccaacgggccaaaatccaactggtacttccattgcagaccatagaaaggaggcaatttacaagatcgctcaaaagtacgacttcctaattgtggaagatgaaccttattatttcttacaaatgaatccctacatcaaagacttgaaggaaagagagaaggcacaaagttctccaaagcaggaccatgacgaatttttgaagtccttggcaaacactttcctttccttggatacagaaggccgtgttattagaatggattccttttcaaaagttttggccccagggacaagattgggttggattactggttcatccaaaatcttgaagccttacttgagtttgcatgaaatgacgattcaagccccagcaggttttacacaagttttggtcaacgctacgctatccaggtggggtcaaaagggttacttggactggttgcttggcctgcgtcatgaatacactttgaaacgtgactgtgccatcgatgccctttacaagtatctaccacaatctgatgctttcgtgatcaatcctccaattgcaggtatgtttttcaccgtgaacattgacgcatctgtccaccctgagtttaaaacaaaatacaactcagacccttaccagctagaacagagtctttaccacaaagtggttgaacgtggtgttttagtggttcccggttcttggttcaagagtgagggtgagacggaacctcctcaacccgctgaatctaaagaagtcagtaatccaaacataattttcttcagaggtacctatgcagctgtctctcctgagaaactgactgaaggtctgaagagattaggtgatactttatacgaagaatttggtatttccaaatag

SEQ ID NO: 50 - protein, 500 aa, Saccharomyces cerevisiae
MTLPESKDFSYLFSDETNARKPSPLKTCIHLFQDPNIIFLGGGLPLKDYFPWDNLSVDSPKPPFPQGIGAPIDEQNCIKYTVNKDYADKSANPSNDIPLSRALQYGFSAGQPELLNFIRDHTKIIHDLKYKDWDVLATAGNTNAWESTLRVFCNRGDVILVEAHSFSSSLASAEAQGVITFPVPIDADGIIPEKLAKVMENWTPGAPKPKLLYTIPTGQNPTGTSIADHRKEAIYKIAQKYDFLIVEDEPYYFLQMNPYIKDLKEREKAQSSPKQDHDEFLKSLANTFLSLDTEGRVIRMDSFSKVLAPGTRLGWITGSSKILKPYLSLHEMTIQAPAGFTQVLVNATLSRWGQKGYLDWLLGLRHEYTLKRDCAIDALYKYLPQSDAFVINPPIAGMFFTVNIDASVHPEFKTKYNSDPYQLEQSLYHKVVERGVLVVPGSWFKSEGETEPPQPAESKEVSNPNIIFFRGTYAAVSPEKLTEGLKRLGDTLYEEFGISK

SEQ ID NO: 51 - DNA, 2154 bp, Arabidopsis thaliana
atggatcaaatcgaagctatgttgtgtggtggtggtgaaaaaacaaaagttgctgttactactaagaccttggctgatccattgaattggggtttagctgctgatcaaatgaagggttctcatttggatgaagtcaagaagatggttgaagaataccgtagaccagttgttaacttaggtggtgagactttgactattggtcaagttgctgctatttctactgttggtggttctgttaaggttgaattggctgaaacttctagagctggtgttaaggcttcttctgattgggttatggaatctatgaacaagggtactgattcttacggtgttactacaggttttggtgctacttctcatagaagaactaagaatggtactgccttgcaaaccgaattgatcagatttttgaacgccggtattttcggtaacaccaaagaaacttgtcataccttgccacaatctgctactagagctgctatgttggttagagttaacactttgttgcaaggttactccggtatcagattcgaaattttggaagctatcacctccttgttgaaccataacatttctccatctttgccattgagaggtactattactgcttctggtgatttggttcccttgtcttatattgctggtttgttgactggtaggccaaattctaaagctactggtccagatggtgaatctttgactgctaaagaagcttttgaaaaggctggtatctctactggttttttcgacttgcaacctaaagaaggtttggctttggttaatggtacagctgttggttctggtatggcttctatggttttgtttgaagctaacgttcaagctgttttggccgaagttttgtctgctatttttgctgaagttatgtctggtaagccagaattcactgatcatttgacccatagattgaaacatcacccaggtcaaattgaagctgctgcaattatggaacatatcttggatggttccagctacatgaagttggctcaaaaagttcacgaaatggacccattgcaaaagccaaaacaagatagatacgctttgagaacttctccacaatggttgggtccacagattgaagttattagacaagccaccaagtccatcgaaagagaaatcaattctgttaacgacaaccccttgatcgatgtctctagaaacaaagctattcacggtggtaatttccaaggtactccaattggtgtttctatggacaacactagattggctattgctgccattggtaaattgatgttcgctcagttttccgaattggtcaacgatttttacaacaacggtttgccttctaacttgaccgcttcttctaatccatcattggattacggttttaagggtgctgaaattgctatggcttcatactgttctgaattgcagtatttggctaacccagttacctctcatgttcaatctgctgaacaacataaccaggatgtcaattccttgggtttgatctcttctagaaagacctctgaagccgttgatatcttgaagttgatgtccactactttcttggttggtatttgccaagctgttgatttgagacacttggaagaaaacttgagacaaaccgttaagaacaccgtttctcaagttgccaaaaaggttttgactaccggtattaacggtgaattgcatccatctagattctgcgaaaaggatttgttgaaggtcgttgatagagaacaggttttcacctatgttgatgatccatgttctgctacttacccattgatgcaaagattgagacaagtcatcgttgatcatgctttgtctaatggtgaaaccgaaaagaacgctgttacctccattttccaaaagattggtgctttcgaagaagaattgaaggccgttttgccaaaagaagttgaagcagctagagcagcttacggtaacggtactgctccaattccaaatagaatcaaagaatgcagaagctaccccttgtacagattcgttagagaagaacttggtacgaagttgttgaccggtgaaaaagttgtttctccaggtgaagaattcgacaaggtttttactgctatgtgtgaaggcaagttgatcgatcctttgatggattgcttgaaagaatggaatggtgccccaattcctatttgctaa

SEQ ID NO: 52 - protein, 717 aa, Arabidopsis thaliana
MDQIEAMLCGGGEKTKVAVTTKTLADPLNWGLAADQMKGSHLDEVKKMVEEYRRPVVNLGGETLTIGQVAAISTVGGSVKVELAETSRAGVKASSDWVMESMNKGTDSYGVTTGFGATSHRRTKNGTALQTELIRFLNAGIFGNTKETCHTLPQSATRAAMLVRVNTLLQGYSGIRFEILEAITSLLNHNISPSLPLRGTITASGDLVPLSYIAGLLTGRPNSKATGPDGESLTAKEAFEKAGISTGFFDLQPKEGLALVNGTAVGSGMASMVLFEANVQAVLAEVLSAIFAEVMSGKPEFTDHLTHRLKHHPGQIEAAAIMEHILDGSSYMKLAQKVHEMDPLQKPKQDRYALRTSPQWLGPQIEVIRQATKSIEREINSVNDNPLIDVSRNKAIHGGNFQGTPIGVSMDNTRLAIAAIGKLMFAQFSELVNDFYNNGLPSNLTASSNPSLDYGFKGAEIAMASYCSELQYLANPVTSHVQSAEQHNQDVNSLGLISSRKTSEAVDILKLMSTTFLVGICQAVDLRHLEENLRQTVKNTVSQVAKKVLTTGINGELHPSRFCEKDLLKVVDREQVFTYVDDPCSATYPLMQRLRQVIVDHALSNGETEKNAVTSIFQKIGAFEEELKAVLPKEVEAARAAYGNGTAPIPNRIKECRSYPLYRFVREELGTKLLTGEKVVSPGEEFDKVFTAMCEGKLIDPLMDCLKEWNGAPIPIC

SEQ ID NO: 53 - DNA, 1518 bp, Arabidopsis thaliana
atggacttgttgttgttggagaagtccttgattgctgttttcgttgctgttattttggccaccgttatctctaaattgaggggtaaaaagttgaagttgccaccaggtccaattccaattcctatttttggtaactggttgcaagttggtgatgacttgaatcacagaaacttggttgattacgccaaaaagttcggtgacctgtttttgttgagaatgggtcaaagaaatttggtcgttgtttcctcaccagacttgaccaaagaagttttgttgactcaaggtgtcgaattcggttccagaactagaaatgttgttttcgatatcttcaccggtaagggtcaagatatggtttttactgtttacggtgaacactggcgtaagatgagaagaattatgactgttccattcttcaccaacaaggtcgttcaacagaatagagaaggttgggaatttgaagctgcttccgttgttgaagatgttaagaagaatccagattctgctaccaagggtatcgtcttgagaaaaagattgcagctgatgatgtacaacaacatgttcagaatcatgttcgacagaaggttcgaatctgaagatgatcctttgttcttgagattgaaggctttgaacggtgaaagatctagattggctcaatctttcgagtacaactacggtgatttcattccaattttgaggccattcttgaggggttacttgaagatttgtcaagatgtcaaggatagaaggatcgccttgttcaaaaagtacttcgttgacgaaagaaagcagatcgcttcttctaaacctactggttctgaaggtttgaagtgcgccattgatcatattttggaagctgaacaaaagggcgaaatcaacgaagataatgtcttgtacatcgtcgagaacattaacgttgctgctattgaaactaccttgtggtctattgaatggggtattgctgaattggttaatcacccagaaatccagtctaagttgagaaacgaattggataccgttttaggtccaggtgttcaagttactgaacctgacttgcataagttgccatacttgcaagctgttgtgaaagaaactctgagattgaggatggctattcctttgttggttccacatatgaacttgcatgatgctaaattggccggttatgatattccagccgaatccaagattttggttaatgcttggtggttggctaacaatccaaattcttggaaaaagccagaagaattcagaccagaaaggtttttcgaagaagagtctcacgttgaagctaacggtaatgattttagatacgttccattcggtgtcggtagaagatcttgtccaggtattatcttggctttgccaattttgggtattaccatcggtagaatggttcagaattttgagttattgccaccacctggtcaatctaaggttgatacttctgaaaaaggtggccaattctccttgcatattttgaaccactccatcatcgttatgaagccaagaaactgttaa

SEQ ID NO: 54 - protein, 505 aa, Arabidopsis thaliana
MDLLLLEKSLIAVFVAVILATVISKLRGKKLKLPPGPIPIPIFGNWLQVGDDLNHRNLVDYAKKFGDLFLLRMGQRNLVVVSSPDLTKEVLLTQGVEFGSRTRNVVFDIFTGKGQDMVFTVYGEHWRKMRRIMTVPFFTNKVVQQNREGWEFEAASVVEDVKKNPDSATKGIVLRKRLQLMMYNNMFRIMFDRRFESEDDPLFLRLKALNGERSRLAQSFEYNYGDFIPILRPFLRGYLKICQDVKDRRIALFKKYFVDERKQIASSKPTGSEGLKCAIDHILEAEQKGEINEDNVLYIVENINVAAIETTLWSIEWGIAELVNHPEIQSKLRNELDTVLGPGVQVTEPDLHKLPYLQAVVKETLRLRMAIPLLVPHMNLHDAKLAGYDIPAESKILVNAWWLANNPNSWKKPEEFRPERFFEEESHVEANGNDFRYVPFGVGRRSCPGIILALPILGITIGRMVQNFELLPPPGQSKVDTSEKGGQFSLHILNHSIIVMKPRNC

SEQ ID NO: 55 - DNA, 2136 bp, Arabidopsis thaliana
atgtcctcctcttcttcatcatccacctctatgattgatttgatggccgctattatcaagggtgaaccagttatagtttctgatccagctaatgcttctgcctatgaatctgttgctgctgaattatcctcaatgttgatcgaaaacagacagttcgctatgatcgttactacctctattgctgttttgatcggttgcatcgttatgttggtttggagaagatctggttctggtaactctaaaagagtcgaaccattgaagccattggttatcaaacctagggaagaagaaattgacgacggtagaaaaaaggtgaccattttctttggtactcaaaccggtactgctgaaggttttgctaaagctttgggtgaagaggctaaagctagatacgaaaagactagattcaagatcgttgacttggatgattacgctgcagatgatgatgaatacgaagagaagttgaagaaagaagatgtcgcctttttcttcttggctacttatggtgatggtgaacctactgataatgctgctagattttacaagtggttcaccgaaggtaatgatagaggtgaatggctgaaaaacttgaagtacggtgtttttggtttgggtaacagacaatacgaacacttcaacaaggttgccaaggttgttgatgatatcttggttgaacaaggtgcccaaagattggttcaagttggtttaggtgatgatgaccaatgcatcgaagatgattttactgcttggagagaagctttgtggccagaattggatacaatcttgagagaagaaggtgatactgctgttgctactccatatactgctgctgttttagagtacagagtttccatccatgattccgaagatgctaagttcaacgatattaacatggctaacggtaacggttacaccgtttttgatgctcaacatccatacaaggctaacgttgctgttaagagagaattgcatactccagaatctgacagatcctgcattcatttggaattcgatattgctggttccggtttgacttacgaaactggtgatcatgttggtgttttgtgcgataacttgtctgaaactgttgatgaagctttgaggttgttggatatgtctccagatacttacttctccttgcatgccgaaaaagaggatggtactccaatttcatcttcattgccaccaccatttccaccatgtaatttgagaactgctttgaccagatacgcttgcttgttgtcatctccaaaaaagtctgctttggttgctttggctgctcatgcttcagatccaactgaagctgaaagattgaaacatttggcttctccagctggtaaggatgaatattctaaatgggttgtcgaatcccagaggtctttgttggaagttatggctgaatttccatctgctaaaccaccattgggtgttttttttgctggtgttgctccaagattgcaacctagattctactctatttccagctctcctaagattgccgaaaccagaattcatgttacttgcgctttggtttacgagaaaatgccaactggtagaatccataagggtgtttgttctacctggatgaagaatgctgttccttacgaaaagtccgaaaactgttcttctgctccaatcttcgttaggcaatccaattttaagttgccctccgattctaaggttcccattattatgattggtccaggtactggtttggctccttttagaggttttctacaagaaagattggccttggtcgaatctggtgttgaattgggtccatctgttttgtttttcggttgcagaaacagaaggatggacttcatatacgaagaagagttgcaaaggttcgtagaatcaggtgctttagctgaattgtccgttgctttttctagagaaggtcccacaaaagaatacgtccaacacaaaatgatggataaggcctctgatatctggaacatgatttctcaaggtgcctacttgtatgtttgcggtgatgctaaaggtatggctagagatgttcatagatccttgcataccattgctcaagaacaaggttctatggattcaactaaggcagaaggtttcgtcaagaacttgcaaacttctggtagatacttgagagatgtctggtga

SEQ ID NO: 56 - protein, 711 aa, Arabidopsis thaliana
MSSSSSSSTSMIDLMAAIIKGEPVIVSDPANASAYESVAAELSSMLIENRQFAMIVTTSIAVLIGCIVMLVWRRSGSGNSKRVEPLKPLVIKPREEEIDDGRKKVTIFFGTQTGTAEGFAKALGEEAKARYEKTRFKIVDLDDYAADDDEYEEKLKKEDVAFFFLATYGDGEPTDNAARFYKWFTEGNDRGEWLKNLKYGVFGLGNRQYEHFNKVAKVVDDILVEQGAQRLVQVGLGDDDQCIEDDFTAWREALWPELDTILREEGDTAVATPYTAAVLEYRVSIHDSEDAKFNDINMANGNGYTVFDAQHPYKANVAVKRELHTPESDRSCIHLEFDIAGSGLTYETGDHVGVLCDNLSETVDEALRLLDMSPDTYFSLHAEKEDGTPISSSLPPPFPPCNLRTALTRYACLLSSPKKSALVALAAHASDPTEAERLKHLASPAGKDEYSKWVVESQRSLLEVMAEFPSAKPPLGVFFAGVAPRLQPRFYSISSSPKIAETRIHVTCALVYEKMPTGRIHKGVCSTWMKNAVPYEKSENCSSAPIFVRQSNFKLPSDSKVPIIMIGPGTGLAPFRGFLQERLALVESGVELGPSVLFFGCRNRRMDFIYEEELQRFVESGALAELSVAFSREGPTKEYVQHKMMDKASDIWNMISQGAYLYVCGDAKGMARDVHRSLHTIAQEQGSMDSTKAEGFVKNLQTSGRYLRDVW

SEQ ID NO: 57 - DNA, 1671 bp, Arabidopsis thaliana
atgactacccaagatgttatcgtcaacgatcaaaacgaccaaaagcaatgttccaacgatgtcatcttcagatctagattgccagatatctacatcccaaaccatttgccattgcacgattacatcttcgaaaacatttctgaattcgctgctaagccatgcttgattaacggtccaactggtgaagtttacacttacgctgatgttcatgttacctctagaaaattggctgctggcttgcataatttgggtgttaagcaacatgatgtcgtcatgattttgttgccaaactctccagaagttgtcttgacttttttggctgcttctttcattggtgctattactacttctgctaacccattttttaccccagccgaaatttctaaacaagctaaagcttctgctgccaagttgatcgttactcaatcaagatacgttgacaagatcaagaacttgcaaaacgatggtgttttgattgtcaccactgattctgatgctattccagaaaactgcttgaggttctctgaattgactcaatctgaagaacctagggttgattccattcctgaaaagatttcaccagaagatgttgttgctttgccattctcttcaggtactactggtttgccaaaaggtgttatgttgactcacaaaggtttggttacatccgttgctcaacaagttgatggtgaaaatccaaacttgtacttcaacagggatgacgttattttgtgcgttttgccaatgtttcatatctacgccttgaactcgattatgctgtgttctttgagagttggtgccaccattttgattatgccaaagttcgaaatcaccctgttgttggaacaaatccaaagatgtaaggttaccgttgctatggttgttccaccaatagttttggctattgctaagtctccagaaaccgaaaagtacgatttgtcctctgttagaatggttaagtctggtgctgctccattgggtaaagaattggaagatgctatttctgctaagttcccaaacgctaaattaggtcaaggttacggtatgactgaagctggtccagttttagctatgtctttgggttttgctaaagagccatttccagtaaaatctggtgcttgtggtactgttgttagaaacgctgaaatgaagatcttggatccagatactggtgattctttgccaagaaacaaaccaggtgagatctgcattagaggtaatcaaattatgaagggctacctgaatgatccattggctactgcttctaccattgataaggatggttggttgcatacaggtgatgttggtttcatagatgatgatgacgagttgttcatcgtcgacagattgaaagaactgatcaagtacaagggtttccaagttgctccagctgaattggaatctttgttgattggtcatccagaaatcaacgatgttgctgttgttgcaatgaaggaagaggacgctggcgaagttccagttgctttcgttgttagatcaaaggactctaatatctccgaggacgaaatcaagcaattcgtttcaaagcaagtcgtgttctacaagagaatcaacaaggttttcttcaccgactctattccaaaagctccatctggtaagatcttgagaaaggatttgagagctagattggctaacggtttgatgaactga

SEQ ID NO: 58 - protein, 556 aa, Arabidopsis thaliana
MTTQDVIVNDQNDQKQCSNDVIFRSRLPDIYIPNHLPLHDYIFENISEFAAKPCLINGPTGEVYTYADVHVTSRKLAAGLHNLGVKQHDVVMILLPNSPEVVLTFLAASFIGAITTSANPFFTPAEISKQAKASAAKLIVTQSRYVDKIKNLQNDGVLIVTTDSDAIPENCLRFSELTQSEEPRVDSIPEKISPEDVVALPFSSGTTGLPKGVMLTHKGLVTSVAQQVDGENPNLYFNRDDVILCVLPMFHIYALNSIMLCSLRVGATILIMPKFEITLLLEQIQRCKVTVAMVVPPIVLAIAKSPETEKYDLSSVRMVKSGAAPLGKELEDAISAKFPNAKLGQGYGMTEAGPVLAMSLGFAKEPFPVKSGACGTVVRNAEMKILDPDTGDSLPRNKPGEICIRGNQIMKGYLNDPLATASTIDKDGWLHTGDVGFIDDDDELFIVDRLKELIKYKGFQVAPAELESLLIGHPEINDVAVVAMKEEDAGEVPVAFVVRSKDSNISEDEIKQFVSKQVVFYKRINKVFFTDSIPKAPSGKILRKDLRARLANGLMN

SEQ ID NO: 59 - DNA, 1167 bp, Pyrococcus furiosus
atgtggtttggtgaatttggtggtcaatacgttccagaaactttggttggtccattgaaagaattggaaaaggcctacaagagattcaaggatgacgaagaattcaacaggcagttgaactactacttgaaaacttgggctggtagaccaactccactgtattatgctaaaagattgaccgaaaagattggtggtgctaaggtttacttgaagagggaagatttggttcatggtggtgcacataagactaacaatgctattggtcaagctttgttggctaagttgatgggtaagactagattgattgctgaaactggtgctggtcaacatggtgttgctactgctatggctggtgctttgttaggtatgaaggttgatatctatatgggtgccgaagatgtcgaaagacaaaagatgaatgtgttcaggatgaagttgttgggtgctaacgttattccagttaactctggttcaagaaccttgaaggatgctattaacgaagctttgagagattgggttgctacttttgagtacacccattacttgatcggttctgttgttggtccacatccatatccaactatcgttagagatttccaatccgtcattggtagagaagctaaggctcaaattttggaagctgaaggtcaattgccagatgttatagttgcttgtgttggtggtggttctaatgctatgggtattttctacccattcgtcaacgataagaaagtcaagttggttggtgttgaagctggtggtaaaggtttggaatctggtaaacattctgcttcattgaacgctggtcaagtaggtgtttctcatggtatgttgtcttacttcctgcaagatgaagaaggtcaaatcaagccatctcattctattgctccaggtttggattatccaggtgttggtcctgaacatgcttatttgaaaaagattcagagagccgaatacgttgctgttacagacgaagaagctttaaaggctttccacgaattgtctagaaccgaaggtattattccagctttggaatcagctcatgctgttgcttatgcaatgaagttggctaaagaaatgtccagggacgaaatcatcatcgttaatttgtctggtagaggtgataaggatctggatatcgttttgaaggcttctggtaacgtttaa

SEQ ID NO: 60 - protein, 388 aa, Pyrococcus furiosus
MWFGEFGGQYVPETLVGPLKELEKAYKRFKDDEEFNRQLNYYLKTWAGRPTPLYYAKRLTEKIGGAKVYLKREDLVHGGAHKTNNAIGQALLAKLMGKTRLIAETGAGQHGVATAMAGALLGMKVDIYMGAEDVERQKMNVFRMKLLGANVIPVNSGSRTLKDAINEALRDWVATFEYTHYLIGSVVGPHPYPTIVRDFQSVIGREAKAQILEAEGQLPDVIVACVGGGSNAMGIFYPFVNDKKVKLVGVEAGGKGLESGKHSASLNAGQVGVSHGMLSYFLQDEEGQIKPSHSIAPGLDYPGVGPEHAYLKKIQRAEYVAVTDEEALKAFHELSRTEGIIPALESAHAVAYAMKLAKEMSRDEIIIVNLSGRGDKDLDIVLKASGNV

SEQ ID NO: 61 - DNA, 1194 bp, Salmonella enterica
atgaccactttgttgaatccatacttcggtgaatttggtggtatgtacgttccacaaattttgatgccagccttgaatcaattggaagaagcttttgtttccgctcaaaaggatccagaatttcaagctcaattcgccgatttgttgaagaattatgctggtagaccaactgctttgaccaagtgtcaaaacattactgctggtactagaaccaccttgtacttgaaaagggaagatttgttgcatggtggtgctcataagaccaatcaagttttgggtcaagctttgttggctaagagaatgggtaagagcgaaattattgctgaaactggtgctggtcaacatggtgttgcttcagctttggcttctgctttgttaggtttgaagtgtagaatctacatgggtgccaaagatgtcgaaagacaatctccaaatgtgttcagaatgagattgatgggtgctgaagttatcccagttcattctggttctgctactttgaaggatgcttgtaatgaagctttgagagattggtctggttcttacgaaactgctcattatatgttgggtactgctgctggtcctcatccatatccaactatcgttagagaattccagagaatgatcggtgaagaaactaaggctcaaatcttggacaaagaaggtagattgccagacgctgttattgcttgtgttggtggtggttcaaatgctattggtatgtttgccgatttcatcaacgatacctctgttggtttgattggtgttgaaccaggtggtcatggtattgaaacaggtaaacatggtgctccattgaagcacggtagagttggtatctattttggtatgaaggctccaatgatgcaaactgctgatggtcaaattgaagagtcctactctatttctgctggtttggattttccatctgttggtccacaacatgcttacttgaattctattggtagagccgactacgtttccattactgatgatgaagccttggaagctttcaagactttgtgtagacatgaaggtattatccctgccttggaatcttctcatgctttggctcatgcattgaagatgatgagagaacagccagaaaaagaacagttgttggttgttaacttgtctggtagaggtgataaggatattttcaccgttcacgatattttgaaggccagaggtgaaatctga

SEQ ID NO: 62 - protein, 397 aa, Salmonella enterica
MTTLLNPYFGEFGGMYVPQILMPALNQLEEAFVSAQKDPEFQAQFADLLKNYAGRPTALTKCQNITAGTRTTLYLKREDLLHGGAHKTNQVLGQALLAKRMGKSEIIAETGAGQHGVASALASALLGLKCRIYMGAKDVERQSPNVFRMRLMGAEVIPVHSGSATLKDACNEALRDWSGSYETAHYMLGTAAGPHPYPTIVREFQRMIGEETKAQILDKEGRLPDAVIACVGGGSNAIGMFADFINDTSVGLIGVEPGGHGIETGKHGAPLKHGRVGIYFGMKAPMMQTADGQIEESYSISAGLDFPSVGPQHAYLNSIGRADYVSITDDEALEAFKTLCRHEGIIPALESSHALAHALKMMREQPEKEQLLVVNLSGRGDKDIFTVHDILKARGEI

SEQ ID NO: 63 - DNA, 1167 bp, Pyrococcus furiosus
atgtggtttggtgaatttggtggtcaatacgttccagaaactttgatcgaaccattgaaagaattggagaaggcctacaagagattcaaggatgatgaagaattcaacaggcagctgaactactacttgaaaacttgggctggtagaccaactccactgtattatgctaaaagattgaccgaaaagattggtggtgctaagatctacttgaagagggaagatttggttcatggtggtgcacataagactaacaatgctattggtcaagctttgttggctaagttcatgggtaagactagattgattgctgaaactggtgctggtcaacatggtgttgctactgctatggctggtgctttgttaggtatgaaggttgatatctatatgggtgccgaagatgtcgaaagacaaaagatgaatgtgttcaggatgaagttgttgggtgctaacgttattccagttaactctggttcaagaaccttgaaggatgctattaacgaagctttgagagattgggttgctacttttgagtacacccattacttgatcggttctgttgttggtccacatccatatccaactatcgttagagatttccaatccgtcattggtagagaagctaaggctcaaattttggaagctgaaggtcaattgccagatgttatagttgcttgtgttggtggtggttctaatgctatgggtattttctacccattcgtcaacgataagaaagtcaagttggttggtgttgaagctggtggtaaaggtttggaatctggtaaacattctgcttcattgaacgctggtcaagtcggtgtttttcatggtatgttgtcttacttcttgcaggacgaagaaggtcaaatcaaacctactcattctattgctccaggtttggattatccaggtgttggtcctgaacatgcttatttgaaaaagattcagagagccgaatacgttaccgttacagatgaagaagctttaaaggccttccacgaattgtctagaaccgaaggtattattccagctttggaatcagctcatgctgttgcttatgcaatgaagttggctaaagaaatgtccagggacgaaatcatcatcgttaatttgtctggtagaggtgataaggatttggacatcgttttgaaggtttccggtaacgtttga

SEQ ID NO: 64 - protein, 388 aa, Pyrococcus furiosus
MWFGEFGGQYVPETLIEPLKELEKAYKRFKDDEEFNRQLNYYLKTWAGRPTPLYYAKRLTEKIGGAKIYLKREDLVHGGAHKTNNAIGQALLAKFMGKTRLIAETGAGQHGVATAMAGALLGMKVDIYMGAEDVERQKMNVFRMKLLGANVIPVNSGSRTLKDAINEALRDWVATFEYTHYLIGSVVGPHPYPTIVRDFQSVIGREAKAQILEAEGQLPDVIVACVGGGSNAMGIFYPFVNDKKVKLVGVEAGGKGLESGKHSASLNAGQVGVFHGMLSYFLQDEEGQIKPTHSIAPGLDYPGVGPEHAYLKKIQRAEYVTVTDEEALKAFHELSRTEGIIPALESAHAVAYAMKLAKEMSRDEIIIVNLSGRGDKDLDIVLKVSGNV

SEQ ID NO: 65 - DNA, 2124 bp, Saccharomyces cerevisiae; identical to SEQ ID NO: 23

SEQ ID NO: 66 - protein, 707 aa, Saccharomyces cerevisiae; identical to SEQ ID NO: 24

SEQ ID NO: 67 - DNA, 1170 bp, Thermotoga maritima
atgaagggttactttggtccatatggtggtcaatacgttccagaaattttgatgccagctttggaagaattggaagctgcttacgaagaaatcatgaaggatgagtctttctggaaagagttcaacgatttgttgagagattatgccggtagaccaactccattatactttgctagaaggttgtctgaaaagtacggtgctagaatctacttgaagagggaagatttgttgcatactggtgcccataagattaacaacgctattggtcaagttctgttggctaaaaagatgggtaagaccagaattattgctgaaactggtgctggtcaacatggtgttgctactgctacagctgctgctttgtttggtatggaatgtgttatctacatgggtgaagaagataccatcagacaaaagccaaacgtcgaaagaactaagttgttgggtgctaaagttgttccagttaagtctggttccagaactttgaaggatgctattgatgaagccttgagagactggattacaaacttgcaaactacctactacgttatcggttctgttgttggtccacatccatatccaattatcgtcagaaacttccaaaaggtcatcggtgaagaaactaagaagcagatcttggaaaaagagggtagattgccagattacatcgttgcttgtgttggtggtggttctaatgctgctggtattttctatccattcatcgattctggtgtcaagttgattggtgttgaagctggtggtgaaggtttggaaactggtaaacatgctgcatctttgttgaagggtaagatcggttacttgcatggttctaagacttttgtgttgcaagatgattggggtcaagtccaagttactcattctgtttctgctggtttggattactcaggtgttggtcctgaacatgcttattggagagaaacaggtaaagtcttgtacgatgctgttactgatgaagaagctttggacgctttcatcgaattgtctagattggaaggtattatcccagccttggaatcttctcatgctttggcttacttgaaaaagatcaacatcaaaggtaaggtcgtcgtcgttaatttgtctggtagaggtgataaggatttggagtctgttttgaaccatccatacgtcagagaaagaatcaggtga

SEQ ID NO: 68 - protein, 389 aa, Thermotoga maritima
MKGYFGPYGGQYVPEILMPALEELEAAYEEIMKDESFWKEFNDLLRDYAGRPTPLYFARRLSEKYGARIYLKREDLLHTGAHKINNAIGQVLLAKKMGKTRIIAETGAGQHGVATATAAALFGMECVIYMGEEDTIRQKPNVERTKLLGAKVVPVKSGSRTLKDAIDEALRDWITNLQTTYYVIGSVVGPHPYPIIVRNFQKVIGEETKKQILEKEGRLPDYIVACVGGGSNAAGIFYPFIDSGVKLIGVEAGGEGLETGKHAASLLKGKIGYLHGSKTFVLQDDWGQVQVTHSVSAGLDYSGVGPEHAYWRETGKVLYDAVTDEEALDAFIELSRLEGIIPALESSHALAYLKKINIKGKVVVVNLSGRGDKDLESVLNHPYVRERIR

SEQ ID NO: 69 - DNA, 1473 bp, Ruminococcus gnavus
atgtcccaagtcatcaagaaaaagcgtaacaccttcatgattggcaccgagtacattttgaactctacccaattggaagaagccatcaagtctttcgttcatgatttctgtgctgaaaagcacgaaatccatgatcaaccagttgttgttgaagccaaagaacaccaagaagataagatcaagcaaatcaagatcccagaaaagggtagaccagttaacgaagttgtttccgaaatgatgaatgaggtctacagatatagaggtgatgctaaccatccaaggttcttttcatttgttccaggtccagcttcttctgtttcttggttgggtgatattatgacctccgcttacaatattcatgctggtggttctaaattggccccaatggttaactgtattgaacaagaggttttgaagtggttggctaagcaagttggttttactgaaaatccaggtggtgtttttgtttccggtggttcaatggctaatattactgctttgactgctgccagagataacaagttgactgatatcaacttgcatttgggtactgcctacatttctgatcaaactcattcctctgttgccaagggtttgagaattattggtatcaccgactccagaatcagaagaattccaactaactcccatttccaaatggataccactaagttggaagaggctattgaaaccgataagaagtctggttacatcccattcgttgttattggtactgctggtactactaataccggttctattgatccattgaccgaaatttctgccttgtgcaagaaacatgatatgtggttccatattgatggtgcttacggtgcttctgttttgttgtctccaaagtacaagtctttgttgactggtactggtttggccgattctatttcttgggatgctcataagtggttgttccaaacttatggttgtgctatggttttggtcaaggacatcagaaacttgttccattcctttcacgttaacccagaatacttgaaggatttggaaaacgatatcgacaacgttaacacctgggatattggtatggaattgactagaccagctaggggtttgaaattgtggttgactttacaagttttgggctccgatttgattggttccgctattgaacatggttttcaattggctgtttgggctgaagaagctttgaatccaaaaaaggattgggagatagtttccccagctcaaatggctatgattaactttagatacgccccaaaggatctgaccaaagaagaacaagatatcctgaacgaaaagatctcccacagaattttggaatctggttacgctgctattttcaccactgttttgaatggtaagaccgtcttgagaatttgcgctattcatccagaagctactcaagaggatatgcaacataccatcgatttgttggaccaatacggtagagaaatctacaccgaaatgaagaaggcttaa

SEQ ID NO: 70 - protein, 490 aa, Ruminococcus gnavus
MSQVIKKKRNTFMIGTEYILNSTQLEEAIKSFVHDFCAEKHEIHDQPVVVEAKEHQEDKIKQIKIPEKGRPVNEVVSEMMNEVYRYRGDANHPRFFSFVPGPASSVSWLGDIMTSAYNIHAGGSKLAPMVNCIEQEVLKWLAKQVGFTENPGGVFVSGGSMANITALTAARDNKLTDINLHLGTAYISDQTHSSVAKGLRIIGITDSRIRRIPTNSHFQMDTTKLEEAIETDKKSGYIPFVVIGTAGTTNTGSIDPLTEISALCKKHDMWFHIDGAYGASVLLSPKYKSLLTGTGLADSISWDAHKWLFQTYGCAMVLVKDIRNLFHSFHVNPEYLKDLENDIDNVNTWDIGMELTRPARGLKLWLTLQVLGSDLIGSAIEHGFQLAVWAEEALNPKKDWEIVSPAQMAMINFRYAPKDLTKEEQDILNEKISHRILESGYAAIFTTVLNGKTVLRICAIHPEATQEDMQHTIDLLDQYGREIYTEMKKA

SEQ ID NO: 71 - DNA, 1320 bp, Psilocybe cubensis
atgcaagttattccagcttgtaactccgctgctattagatctttgtgtccaactccagaatccttcagaaatatgggttggttgtctgtttctgatgctgtctactctgaattcattggtgaattggctactagagcctctaacagaaattactctaacgagtttggtctgatgcagccaatccaagaattcaaggctttcattgaatccgatccagttgtccatcaagagttcattgatatgttcgaaggtatccaagactccccaagaaattaccaagaattgtgcaatatgttcaacgacatcttcagaaaggctccagtttatggtgatttgggtccaccagtttacatgattatggctaagttgatgaacaccagagctggtttttctgctttcactagacaaagattgaacctgcacttcaagaagttgtttgatacttggggtctgttcttgtcctctaaggattctagaaatgttttggttgccgatcaattcgatgatagacattgtggttggttgaatgaacgtgctttgtctgctatggttaagcactataatggtagagccttcgacgaagttttcttgtgtgataagaatgctccttactacggcttcaactcttacgatgattttttcaacagaaggttccgtaacagagatatcgatagaccagttgttggtggtgttaacaacactactttgatttctgctgcttgcgagtctttgtcttacaacgtttcttatgacgtccaatctttggacaccttggtttttaaaggtgaaacctactctctgaagcacttgttgaacaatgatccattcactccacaattcgaacacggttctattctgcaaggtttcttgaatgttaccgcttaccatagatggcatgcaccagttaatggtactatcgttaagatcatcaacgtcccaggtacttattttgctcaagctccatctactatcggtgatccaattccagataatgattatgatccaccaccatacttgaagtccttggtttacttttctaacattgccgccagacagatcatgttcattgaagctgataacaaagagatcggcttgatcttcttggttttcattggtatgaccgaaatctctacttgtgaagctactgttagtgaaggtcaacatgttaacagaggtgatgacttgggtatgtttcattttggtggttcttcattcgctttgggtttgagaaaagattgcagagctgaaatcgttgaaaagttcactgaaccaggtactgtcatcagaatcaatgaagttgtagctgctttgaaggcctga

SEQ ID NO: 72 - protein, 439 aa, Psilocybe cubensis
MQVIPACNSAAIRSLCPTPESFRNMGWLSVSDAVYSEFIGELATRASNRNYSNEFGLMQPIQEFKAFIESDPVVHQEFIDMFEGIQDSPRNYQELCNMFNDIFRKAPVYGDLGPPVYMIMAKLMNTRAGFSAFTRQRLNLHFKKLFDTWGLFLSSKDSRNVLVADQFDDRHCGWLNERALSAMVKHYNGRAFDEVFLCDKNAPYYGFNSYDDFFNRRFRNRDIDRPVVGGVNNTTLISAACESLSYNVSYDVQSLDTLVFKGETYSLKHLLNNDPFTPQFEHGSILQGFLNVTAYHRWHAPVNGTIVKIINVPGTYFAQAPSTIGDPIPDNDYDPPPYLKSLVYFSNIAARQIMFIEADNKEIGLIFLVFIGMTEISTCEATVSEGQHVNRGDDLGMFHFGGSSFALGLRKDCRAEIVEKFTEPGTVIRINEVVAALKA

SEQ ID NO: 73 - DNA, 3042 bp, Psilocybe cubensis
atgccatcttctcatccacatatcacccatagatatagagttccatcttccgatgatcacgaaagaatttctgctttgtttttgggtccaaaggctgaaaatgctgctttcttgcaacaatggttgactactgttgttgctcaacaaaaagctgctagagatgcttactttccagatgataacgctttcattaccaccgatatgcaaacttctccagcttttgctcaaaccactaaggttattgcttctaacttgactgagttgttgactgctttgggtgaaagatctattccattcttctcaccaagatactccggtcatatgtctgttgatcaatctttgccagctatcttgggttttttgtctactactttctacaacccaaacaacgttgcttttgaagcttctccattcaccaccttgattgaagaagaagtcggtctacaattgtccgaaatgttgggttacaacagattgaacaacaccgaaaaaccattggcttggggtcatattgcttcaggtggtactgttgctaatttggaagctatgtgggctgctagaaatttgaagttttacccattgtccttgagagatgcatcagctgaaggtgctgaaatggaattcattagagataccttctctgttaagacctgcgttggtgataagaagttgttgaaagattgctccccatgggaattattgaacttgcatgtttccaccatcttggatatgccagatagattgcatgatgagtacaacatctctccacagttcttggaaaaggtcatgagaaagtacattatccagtccactaacaaggacaccttgatgcaaagatggggtttgactcaacaaccagttgttttgtctccatctaccaatcattactcttggcctaaagctgctgctgttttaggtattggttctgacaatttgagaaacgttccagttgatattcaagcccacatggatatcaacgaattggacagaatgttgaagatctgcttggatgaagaaaccccagtttatcaagttgttgccgttattggtactactgaagaaggtggcgttgatagaattaccgagattttgaagttgaggcaaaagtacgaagctttgggtttgtcttttgctattcatgctgatgctgcttggggtggttattttgctactatgttgccaaaagataccttgggtagaaacagaaccagattaccaaaagaagataccacctctggtttcgttccacatgttggtttgagagaagaatctgcattgcaattgtcccatattaagtacgccgattccattactatcgatccacataaggctggttatgttccatatccagctggtgctttgtgttatagagatggtagaatgagatacctgttgacttggtctgctccatatttggctcaaggtaatgaaggtcaatccattggtatctacggtatcgaaggttctaaaccaggtgctgctgcttcagctgtttttatggctcacgaaactattggtttaaccccatcaggttacggtaatttgttgggtcaagctatgttcacctgtagaagatatgctgctcattggtcagctatgtctactgataccacttcttttactgttaccccattcaatccaattccagccgatattgatccaaatgctgatccagctaaagtcgaagaacaaaagcagttcatcagagacagaatcctgttcaagtctaacgaagaaatctacaacgattccgaagccatggaattgctacatcaattgggttctgatctgaacattaacgttttcgcttgcaacttcagagatagggacaacaatttgaacaccgatgtcgaagaagctaactggttgaacaatagaatcttccagagattctccgttacctctgctgaagaaaatccattagaaaccccttttttcttgtcctccactaccttgaaacaatccgaatatggtgtttgtgctaccgaagtgaaaagaaggatgggtttagttggtgaccaagatgttattgtcttgaggaacgttgttatgtccccattcactactaccaatgatttcgttggtactttggctaacaccttccaaaagatcgttgaagaggaagttgaatacgccagaatcagaaatgatatgaagccatccatccacactttcttgttgcatggttctggtgaacagtactatttggttcatactccaactatccatatggcatctggtagaaggcaaatcatcttgtctgttaatgtcgaaggtcaagtcagacaagcaattcatgcacacgaaagagttgaagctgttatcgttcataacactgtcccattgagattggacgaaatagttgatggtggttccttcgatggtattttgactattggtaagcgtaagacctccttcaaggttaagatttccaacatcaaggtcgtcaagaaaaggtctttgatgaccgaagatttggaatctgcttacccatcattgatgccattttacttctatggtactcaaggtcatgctcacttggatcatgttattaccgttgttccaaacatccatttgtccgctggtgaaattcagtacaagttcgatgatgaagtttcctctgaggatttggcaaaaggtttgatagttgttgctgaaaacgttcacgaagcttccatgcaaccatttccattgatgaaggatttcaagatcaccaaccagtttttcttctcttccggtcaaatcttgagagtcaaggtttacagagatccatatcctgcttctaccatggatccaataccattgcacgatatcaagaatcaaccagtcgttacacaaggtactatcactttggttggtaacatctacgttgattccgatgctttgaatgttgcttctgaacctactgctgatgaagatgctgcacatgttcctcatgcaagaaatatgtatggtgaaatgactgctggcactatcaaaggttggcaaaatgctgttagacacttccacaacaagttggaaactgttgctccaactaagtaa

SEQ ID NO: 74 - protein, 1013 aa, Psilocybe cubensis
MPSSHPHITHRYRVPSSDDHERISALFLGPKAENAAFLQQWLTTVVAQQKAARDAYFPDDNAFITTDMQTSPAFAQTTKVIASNLTELLTALGERSIPFFSPRYSGHMSVDQSLPAILGFLSTTFYNPNNVAFEASPFTTLIEEEVGLQLSEMLGYNRLNNTEKPLAWGHIASGGTVANLEAMWAARNLKFYPLSLRDASAEGAEMEFIRDTFSVKTCVGDKKLLKDCSPWELLNLHVSTILDMPDRLHDEYNISPQFLEKVMRKYIIQSTNKDTLMQRWGLTQQPVVLSPSTNHYSWPKAAAVLGIGSDNLRNVPVDIQAHMDINELDRMLKICLDEETPVYQVVAVIGTTEEGGVDRITEILKLRQKYEALGLSFAIHADAAWGGYFATMLPKDTLGRNRTRLPKEDTTSGFVPHVGLREESALQLSHIKYADSITIDPHKAGYVPYPAGALCYRDGRMRYLLTWSAPYLAQGNEGQSIGIYGIEGSKPGAAASAVFMAHETIGLTPSGYGNLLGQAMFTCRRYAAHWSAMSTDTTSFTVTPFNPIPADIDPNADPAKVEEQKQFIRDRILFKSNEEIYNDSEAMELLHQLGSDLNINVFACNFRDRDNNLNTDVEEANWLNNRIFQRFSVTSAEENPLETPFFLSSTTLKQSEYGVCATEVKRRMGLVGDQDVIVLRNVVMSPFTTTNDFVGTLANTFQKIVEEEVEYARIRNDMKPSIHTFLLHGSGEQYYLVHTPTIHMASGRRQIILSVNVEGQVRQAIHAHERVEAVIVHNTVPLRLDEIVDGGSFDGILTIGKRKTSFKVKISNIKVVKKRSLMTEDLESAYPSLMPFYFYGTQGHAHLDHVITVVPNIHLSAGEIQYKFDDEVSSEDLAKGLIVVAENVHEASMQPFPLMKDFKITNQFFFSSGQILRVKVYRDPYPASTMDPIPLHDIKNQPVVTQGTITLVGNIYVDSDALNVASEPTADEDAAHVPHARNMYGEMTAGTIKGWQNAVRHFHNKLETVAPTK

SEQ ID NO: 75 - DNA, 1293 bp, Psilocybe serbica
atgcaagttttgccagcttgtcaatcctctgctttgaaaactttgtgtccatctccagaagccttcagaaaattaggttggttgccaacttctgacgaagtctacaacgaattcattgatgatttgaccggtagaacctgcaacgaaaagtattcttctcaagtcactctgttgaagccaatccaagatttcaagaccttcatcgaaaacgatccaatcgtctaccaagagttcatctctatgttcgaaggtatcgaacaatccccaactaactaccatgaattgtgcaatatgttcaacgacatctttagaaaggccccattatatggtgatttgggtccaccagtttacatgattatggccagaattatgaacacccaagctggtttttctgccttcacaaaagaatccttgaacttccacttcaagaagttgtttgatacctggggtttgttcctgtcctctaagaattctagaaacgttttggttgccgatcagttcgatgacaaacattatggttggttttctgaaagggctaagactgccatgatgattaactatccaggtaggactttcgagaaggttttcatctgtgatgaacacgttccataccatggttttacctcttacgatgattttttcaacagacgtttcagagataaggataccgatagaccagttgttggtggtgttactgatacaactttgattggtgctgcttgcgaatctttgtcttacaacgtttctcacaacgtccaatctttggataccttggttattaagggtgaagcctactccttgaaacatttgttgcataacgatccattcactccacaattcgaacatggttccattatccaaggtttcttgaacgttactgcttaccatagatggcattctccagttaatggtactatcgttaagatcgttaatgttccaggtacttactttgctcaagctccatatacaatcggttctccaattccagataacgatagagatccaccaccatacttaaagtccttggtttacttctctaacattgccgccagacaaatcatgttcattgaagctgataacaaggacatcggcttgattttcttggtgttcattggtatgaccgaaatctctacttgtgaagctactgtttgcgaaggtcaacatgttaatagaggtgatgacttgggtatgtttcatttcggtggttcttcatttgctttgggtttgagaaaagattccaaggccaagattttggagaagatcaacgaattggttgcctccgttagaaagtga

SEQ ID NO: 76 - protein, 430 aa, Psilocybe serbica
MQVLPACQSSALKTLCPSPEAFRKLGWLPTSDEVYNEFIDDLTGRTCNEKYSSQVTLLKPIQDFKTFIENDPIVYQEFISMFEGIEQSPTNYHELCNMFNDIFRKAPLYGDLGPPVYMIMARIMNTQAGFSAFTKESLNFHFKKLFDTWGLFLSSKNSRNVLVADQFDDKHYGWFSERAKTAMMINYPGRTFEKVFICDEHVPYHGFTSYDDFFNRRFRDKDTDRPVVGGVTDTTLIGAACESLSYNVSHNVQSLDTLVIKGEAYSLKHLLHNDPFTPQFEHGSIIQGFLNVTAYHRWHSPVNGTIVKIVNVPGTYFAQAPYTIGSPIPDNDRDPPPYLKSLVYFSNIAARQIMFIEADNKDIGLIFLVFIGMTEISTCEATVCEGQHVNRGDDLGMFHFGGSSFALGLRKDSKAKILEKINELVASVRK

SEQ ID NO: 77 - DNA, 1311 bp, Panaeolus cyanescens
atgcaagttttgactgcttgttacacctctaccttgaaatctttgttgccatctttcgatgccttcagatctatgggttggttgccagtttctgataagacttacaatgaatggatcggtgacttgagatctagagcttcagataagaactacacctctcaagttggtttgattcagccaatcaaggattttaaggccttcatcgaatctgatccagttgttcatcaagagttcatcactatgttcgaaggtatcgaagaatccccaagaaactacgaagaattgtgccatatgttcaacgacattttcagaaaggctccagtttatggtgatttgggtccaccagtttacatggttatggctagaattatgaacacccaagctggtttttctgctttcactaagcaatctttgaactcccatttcaagaggttgtttgatacttggggtgtgttcctgtcatccaaagaatctagatacgttttggttaccgatcagttcgacgataatcattatggttggttgtctgatagagctaagtctgctatggtcaaacattactacggtagaactttcgagcaggttttcatctgtgatgaacatgctccataccatggtttccaatcttacgatgatttcttcaacagaaggttcagagatagagatatcgatagaccagttgttggtggtattgaaaacaccactttgatttctgctgcttgcgaatctttgtcttacaacgtttgtcatgacttgcagtctttggataccttgtttgttaagggtgagtcctactccttgaagcacttgttgaatgatgatccattcgccagacaattcgaacatggttctattctgcaaggtttcttgaacgttactgcttaccatagatggcatgcaccagttaatggtactatcttgaagatcattaacgttccaggtacttactttgctcaagctccacatacaattggtgattccttggattctgatcatccaccatatttgaagtccttggcttacttctctaacattgctgccagacagattatgttcattgaagccgataacaaggacatcggcttgattttcttggtgttcattggtatgaccgaaatctctacttgtgaagctactgtttctgaaggtcaacatgttaacagaggtgatgacttgggtatgtttcattttggtggttcttcattcgctttgggtttgagaaaagattgcaaggccgaaatcttcgaaaggtttgctgaacaaggtactgtcatcaagatcaacgaagttgttgctgctgttaaggactga

SEQ ID NO: 78 - protein, 436 aa, Panaeolus cyanescens
MQVLTACYTSTLKSLLPSFDAFRSMGWLPVSDKTYNEWIGDLRSRASDKNYTSQVGLIQPIKDFKAFIESDPVVHQEFITMFEGIEESPRNYEELCHMFNDIFRKAPVYGDLGPPVYMVMARIMNTQAGFSAFTKQSLNSHFKRLFDTWGVFLSSKESRYVLVTDQFDDNHYGWLSDRAKSAMVKHYYGRTFEQVFICDEHAPYHGFQSYDDFFNRRFRDRDIDRPVVGGIENTTLISAACESLSYNVCHDLQSLDTLFVKGESYSLKHLLNDDPFARQFEHGSILQGFLNVTAYHRWHAPVNGTILKIINVPGTYFAQAPHTIGDSLDSDHPPYLKSLAYFSNIAARQIMFIEADNKDIGLIFLVFIGMTEISTCEATVSEGQHVNRGDDLGMFHFGGSSFALGLRKDCKAEIFERFAEQGTVIKINEVVAAVKD

SEQ ID NO: 79 - DNA, 1443 bp, Crocus sativus
atgggtagcgaaggtcgtcagctgcatatctttatgtttccgtttatggcacatggtcatatgattccgattgtggatatggcaaaactgtttgcaagccgtggtatcaaaattaccattgttaccacaccgctgaacagcattagcattagtaaaagcctgcataattgtagcccgaatagcctgattcagctgctgattctgaaatttccggcagccgaagcaggtctgccggatggttgtgaaaatgcagatagcattccgagcatggatctgctgccgaaattctttgaagcagttagcctgctgcagcctccgtttgaagaagcactgcataacaatcgtccggattgtctgattagcgatatgttttttccgtggaccaatgatgttgcagatcgtgttggtattccgcgtctgatttttcatggcaccagctgttttagcctgtgtagcagcgaatttatgcgtctgcataaaccgtatcagcatgttagcagcgataccgaaccgtttaccattccgtatctgcctggtgatattaaactgaccaaaatgaaactgccgatctttgtgcgtgaaaacagcgaaaatgaattcagcaaattcatcaccaaggtgaaagaaagcgaaagcttttgctatggtgttgtggtgaacagcttttatgaactggaagccgaatatgtggattgctataaagatgttctgggtcgtaaaacctggaccattggtccgctgagcctgaccaataccaaaacacaagaaattaccctgcgtggtcgtgaaagcgcaattgatgaacatgaatgtctgaaatggctggatagccagaaaccgaatagcgttgtttatgtttgctttggtagcctggccaaatttaacagcgcacagctgaaagaaattgccattggtctggaagcaagcggcaaaaaattcatttgggttgtgcgtaaaggtaaaggcgaagaagaagaggaagaacagaattggctgcctgaaggttatgaagaacgtatggaaggcaccggtctgattattcgtggttgggcaccgcaggttctgattctggatcatccgagcgttggtggttttgttacccattgtggttggaatagcaccctggaaggtgttgcagccggtgttccgatggttacctggcctgttggtgcagaacagttctataatgaaaaactggttaccgaggtgctgaaaaccggtgttggtgtgggtgttcagaaatgggcacctggtgttggcgattttattgaaagcgaagcagttgaaaaagccattcgtcgcattatggaaaaagaaggtgaagaaatgcgtaaccgtgcaattgaactgggtaaaaaagcaaaatgggcagttggtgaagaaggtagcagctatagtaatctggatgcactgattgaagaactgaaaagcctggccttttaa

SEQ ID NO: 80 - protein, 480 aa, Crocus sativus
MGSEGRQLHIFMFPFMAHGHMIPIVDMAKLFASRGIKITIVTTPLNSISISKSLHNCSPNSLIQLLILKFPAAEAGLPDGCENADSIPSMDLLPKFFEAVSLLQPPFEEALHNNRPDCLISDMFFPWTNDVADRVGIPRLIFHGTSCFSLCSSEFMRLHKPYQHVSSDTEPFTIPYLPGDIKLTKMKLPIFVRENSENEFSKFITKVKESESFCYGVVVNSFYELEAEYVDCYKDVLGRKTWTIGPLSLTNTKTQEITLRGRESAIDEHECLKWLDSQKPNSVVYVCFGSLAKFNSAQLKEIAIGLEASGKKFIWVVRKGKGEEEEEEQNWLPEGYEERMEGTGLIIRGWAPQVLILDHPSVGGFVTHCGWNSTLEGVAAGVPMVTWPVGAEQFYNEKLVTEVLKTGVGVGVQKWAPGVGDFIESEAVEKAIRRIMEKEGEEMRNRAIELGKKAKWAVGEEGSSYSNLDALIEELKSLAF

SEQ ID NO: 81 - DNA, 1458 bp, Populus trichocarpa
atgggtagcctgggtcatcagctgcatatcttttttctgccgttttttgcacatggccatatgattccgagcgttgatatggcaaaactgtttgcaagccgtggtattaaaaccaccattattaccacaccgctgaacgcaccgttttttagcaaaaccattcagaaaaccaaagagctgggcttcgatattaacatcctgaccatcaaatttccggcagcagaagcaggtctgccggaaggttatgaaaataccgatgcatttatcttcagcgaaaatgcacgtgagatgacgatcaaattcattaaagcaaccacctttctgcaggcaccgtttgaaaaagttctgcaagaatgtcatccggattgtattgttgccgatgttttttttccgtgggcaaccgatgcagcagcaaaatttggtattccgcgtctggtttttcatggcaccagcaattttgcactgagcgcaagcgaatgtgttcgtctgtatgaaccgcataaaaaagttagcagcgatagcgaaccgtttgttgttccggatctgcctggtgatattaaactgaccaaaaaacagctgccggatgatgttcgtgaaaatgtggaaaatgacttcagcaaattcctgaaagcaagcaaagaagcagaactgcgtagctttggtgttgttgtgaatagcttttatgaactggaaccggcatatgcggactactacaaaaaagtgctgggtcgtcgtgcatggaatgttggtccggttagcctgtgtaatcgtgataccgaagataaagcaggtcgtggtaaagaaaccagcattgatcatcatgaatgtctgaaatggctggacagcaaaaaaccgaatagcgttgtgtatatttgctttggtagcaccacgaattttagcgatagccagctgaaagaaattgcagccggtctggaagcaagcggtcagcagtttatttgggttgttcgtcgtaacaaaaaaggccaagaggataaagaagattggctgcctgaaggctttgaagaacgtatggaaggtgttggtctgattattcgtggttgggcaccgcaggttctgattctggatcatgaagcaattggtgcatttgttacccattgtggttggaatagcaccctggaaggtattaccgcaggtaaaccgatggttacctggccgatttttgcagaacagttctataatgaaaaactggtgaccgatgtgctgaaaaccggtgttggtgtgggtgttaaagaatggtttcgtgttcatggtgatcacgttaaaagcgaagcagtggaaaaaaccattacgcagattatggttggtgaagaggccgaagaaatgcgtagccgtgccaaaaaactgggtgaaaccgcacgtaaagcagttgaagaaggtggtagcagctatagtgattttaatgccctgattgaagaactgcgctggcgtcgtccgtaa

SEQ ID NO: 82 - protein, 485 aa, Populus trichocarpa
MGSLGHQLHIFFLPFFAHGHMIPSVDMAKLFASRGIKTTIITTPLNAPFFSKTIQKTKELGFDINILTIKFPAAEAGLPEGYENTDAFIFSENAREMTIKFIKATTFLQAPFEKVLQECHPDCIVADVFFPWATDAAAKFGIPRLVFHGTSNFALSASECVRLYEPHKKVSSDSEPFVVPDLPGDIKLTKKQLPDDVRENVENDFSKFLKASKEAELRSFGVVVNSFYELEPAYADYYKKVLGRRAWNVGPVSLCNRDTEDKAGRGKETSIDHHECLKWLDSKKPNSVVYICFGSTTNFSDSQLKEIAAGLEASGQQFIWVVRRNKKGQEDKEDWLPEGFEERMEGVGLIIRGWAPQVLILDHEAIGAFVTHCGWNSTLEGITAGKPMVTWPIFAEQFYNEKLVTDVLKTGVGVGVKEWFRVHGDHVKSEAVEKTITQIMVGEEAEEMRSRAKKLGETARKAVEEGGSSYSDFNALIEELRWRRP

SEQ ID NO: 83 - DNA, 1404 bp, Helianthus annuus
atggaaagcagcaccgttgttatgtatccgagtcctggtattggtcatctggttagcatggttgaactgggtaaactgattcatacccatcatccgagcctgagcgttattattctgattctgaccgcaccgtatgaaaccggtgcaaccggcaaatatatcaataccgttagcgcaaccacaccggcaattacctttcatcatctgcctgcaattgccctgcctccggattttagcagcgaatttattgatctggcatttggtctgccggaactgtataatagcgttgttcataataccctggttgccattagccagaaaagcaccattaaagcagttatcctggatttctttagcaacgcagcatttcaggttagcaccaatctgagcctgccgacctattatttctttaccagcggcacctttggtctgtgtgcatttctgtatctgaccacactgcataaaaccacgagcaaaagcattaaagatctgaataccctgctggattttccgggtgttccgcctattcatagcagccatatgccgaccgcaatttttgatcgtgaaagcaacagctacaaaaactttatgaaaaccagcaacaacatggccaaatgcagcggtattattgtgaatagctttctggaactggaagaacgtgcagttgcaaccctgcgtgatggtaaatgtattaccgatggtccgacacctccgatttatttcattggtccgctgattgcaagcggtagccaggttgatccgaatgaaaatgaatgtctgaaatggctgaaaacccagccgagcaaatcagttgtttttctgtgttttggtagcatgggcgtgtttgaaaaagaacagctgaaagaaattgccgttggtctggaacgtagcggtcagcgttttctgtgggttgttcgtaatccgcctctggaaagctcaagcggtgcaaaagaatttgaactggatgatatcctgccggaaggttttctgacccgtaccaaagataaaggtctggttgtgaaaaattgggcaccgcagcctgccattctgggtcatgaaagcgttggtggttttgttagccattgtggttggaatagcagcctggaagcagttgttagcggtgttccgatggttgcatggcctctgtatgcagaacagcagatgaatcgtgtttatctggtggaagaaattaaagttgcactgtggctgcgtatgagcgcagatggttttgtgggtgcagaagccgttgaagaaaccgttcgcaaactgatggaaggtgaagagggtcgtgcagttcgtgagcagattctggaaatgagcggtggtgccaaagcagcagttgaagatggtggtagcagccgtctggatttcctgaaactgacccgtccgtggaccgatcagtaa

SEQ ID NO: 84 - protein, 467 aa, Helianthus annuus
MESSTVVMYPSPGIGHLVSMVELGKLIHTHHPSLSVIILILTAPYETGATGKYINTVSATTPAITFHHLPAIALPPDFSSEFIDLAFGLPELYNSVVHNTLVAISQKSTIKAVILDFFSNAAFQVSTNLSLPTYYFFTSGTFGLCAFLYLTTLHKTTSKSIKDLNTLLDFPGVPPIHSSHMPTAIFDRESNSYKNFMKTSNNMAKCSGIIVNSFLELEERAVATLRDGKCITDGPTPPIYFIGPLIASGSQVDPNENECLKWLKTQPSKSVVFLCFGSMGVFEKEQLKEIAVGLERSGQRFLWVVRNPPLESSSGAKEFELDDILPEGFLTRTKDKGLVVKNWAPQPAILGHESVGGFVSHCGWNSSLEAVVSGVPMVAWPLYAEQQMNRVYLVEEIKVALWLRMSADGFVGAEAVEETVRKLMEGEEGRAVREQILEMSGGAKAAVEDGGSSRLDFLKLTRPWTDQ

SEQ ID NO: 85 - DNA, 1431 bp, Persicaria tinctoria
atggaatctccagctgctccaccaactacagctccaccaccacatgttattatcatgccatctgctggtatgggtcatttgattccattggctgaattcgctaagagattgctaccaagattcactttcactttcgctgttccaacttctggtccaccatcttcatctcaaagagatttcttatcttccttgccagcctctattgatacttcatttttgcctgaagttgacttgtctgatgctccatcagatgctcaaattgaaaccttgatgtccttgatggttgtcagatctttgccatctttgagagatttgattgcttcctattctgcctctggtagaagagttgctgctttggttgttgatttgtttgctaccgatgctattgatgttgctttggaattgggtatcagaccctttattttcttcccatctactgctatgaccctgtcttttttcttgcacttggaaaagttggacgaaaccgtttcttgtgaatttgccgaattgtctgatccagttcaaattccaggttgcattccagttcatggtaaggatttgatagatccagtccaagatagaaagaacgatgcttacaaatggttgttgcatcactccaagagatacaaattagccgaaggtgttatcgtcaactctttcgaaggtttggaaggtggtccaatcagagaattattgcatccagaaccaggtaagccaagagtttatccagttggtccattgattcaagctggttcatgtgaaaaaggtgctgctgctagaccagaatgtttgaaatggttggatcaacagccaagaggttctgttttgtttgttaattttggttccggtggtgtcttgtctactgaacaacaaaatgaattggctggtgttttggcccattctcaacaaagatttttgtgggttgttagaccaccaaacgatggtattgctaatgctacttacttctccgttgatggtgaaatcgatccattgaagttgttgccagaaggtttcttggaacaaactgctggtagaggtttggttttgccaatgtgggctccacaaattgatgttttgtctcatgaatctactggtggtttcttgactcattgtggttggaattctaccttggaatctgtttttcatggtgtcccattgattacctggccattatatgcagaacaaaagatgaacgctgtcatgttgactgaaggtttgagagttggtttaagaccatccgttggtaaggacggtattattagaggtgacgaaattgccagagttatcggtgaattgatggaaggtgaagaaggtaagagaatcaggtctaagatgcaagaattgaagagagctgcttctgccgttttgtctaaagatggttcttctactagagccttagaagaagttgccaagatttgggaatctaaggtc

SEQ ID NO: 86 - protein, 477 aa, Persicaria tinctoria
MESPAAPPTTAPPPHVIIMPSAGMGHLIPLAEFAKRLLPRFTFTFAVPTSGPPSSSQRDFLSSLPASIDTSFLPEVDLSDAPSDAQIETLMSLMVVRSLPSLRDLIASYSASGRRVAALVVDLFATDAIDVALELGIRPFIFFPSTAMTLSFFLHLEKLDETVSCEFAELSDPVQIPGCIPVHGKDLIDPVQDRKNDAYKWLLHHSKRYKLAEGVIVNSFEGLEGGPIRELLHPEPGKPRVYPVGPLIQAGSCEKGAAARPECLKWLDQQPRGSVLFVNFGSGGVLSTEQQNELAGVLAHSQQRFLWVVRPPNDGIANATYFSVDGEIDPLKLLPEGFLEQTAGRGLVLPMWAPQIDVLSHESTGGFLTHCGWNSTLESVFHGVPLITWPLYAEQKMNAVMLTEGLRVGLRPSVGKDGIIRGDEIARVIGELMEGEEGKRIRSKMQELKRAASAVLSKDGSSTRALEEVAKIWESKV

SEQ ID NO: 87 - DNA, 1527 bp, Psilocybe cubensis
atgatcgctgttttgttctctttcgttatcgctggttgtatctactacatcgtttctagaagagttagaagatctagattgccaccaggtccaccaggtatcccaatcccattcatcggtaacatgttcgacatgccagaagaatctccatggttgactttcttgcaatggggtagagactacaacactgacatcttgtacgttgacgctggtggtactgaaatggttatcttgaacactttggaaactatcactgacttgttggaaaagagaggttctatctactctggtagattggaatctactatggttaacgaattgatgggttgggaattcgacttgggtttcatcacttacggtgacagatggagagaagaaagaagaatgttcgctaaggaattctctgaaaagggtatcaagcaattcagacacgctcaagttaaggctgctcaccaattggttcaacaattgactaagactccagacagatgggctcaacacatcagacaccaaatcgctgctatgtctttggacatcggttacggtatcgacttggctgaagacgacccatggttggaagctactcacttggctaacgaaggtttggctatcgcttctgttccaggtaagttctgggttgactctttcccatctttgaagtacttgccagcttggttcccaggtgctgttttcaagagaaaggctaaggtttggagagaagctgctgaccacatggttgacatgccatacgaaactatgagaaagttggctccacaaggtttgactagaccatcttacgcttctgctagattgcaagctatggacttgaacggtgacttggaacaccaagaacacgttatcaagaacactgctgctgaagttaacgttggtggtggtgacactactgtttctgctatgtctgctttcatcttggctatggttaagtacccagaagttcaaagaaaggttcaagctgaattggacgctttgactaacaacggtcaaatcccagactacgacgaagaagacgactctttgccatacttgactgcttgtatcaaggaattgttcagatggaaccaaatcgctccattggctatcccacacaagttgatgaaggacgacgtttacagaggttacttgatcccaaagaacactttggttttcgctaacacttgggctgttttgaacgacccagaagtttacccagacccatctgttttcagaccagaaagatacttgggtccagacggtaagccagacaacactgttagagacccaagaaaggctgctttcggttacggtagaagaaactgtccaggtatccacttggctcaatctactgtttggatcgctggtgctactttgttgtctgctttcaacatcgaaagaccagttgaccaaaacggtaagccaatcgacatcccagctgacttcactactggtttcttcagacacccagttccattccaatgtagattcgttccaagaactgaacaagtttctcaatctgtttctggtccataa

SEQ ID NO: 88 - protein, 508 aa, Psilocybe cubensis
MIAVLFSFVIAGCIYYIVSRRVRRSRLPPGPPGIPIPFIGNMFDMPEESPWLTFLQWGRDYNTDILYVDAGGTEMVILNTLETITDLLEKRGSIYSGRLESTMVNELMGWEFDLGFITYGDRWREERRMFAKEFSEKGIKQFRHAQVKAAHQLVQQLTKTPDRWAQHIRHQIAAMSLDIGYGIDLAEDDPWLEATHLANEGLAIASVPGKFWVDSFPSLKYLPAWFPGAVFKRKAKVWREAADHMVDMPYETMRKLAPQGLTRPSYASARLQAMDLNGDLEHQEHVIKNTAAEVNVGGGDTTVSAMSAFILAMVKYPEVQRKVQAELDALTNNGQIPDYDEEDDSLPYLTACIKELFRWNQIAPLAIPHKLMKDDVYRGYLIPKNTLVFANTWAVLNDPEVYPDPSVFRPERYLGPDGKPDNTVRDPRKAAFGYGRRNCPGIHLAQSTVWIAGATLLSAFNIERPVDQNGKPIDIPADFTTGFFRHPVPFQCRFVPRTEQVSQSVSGP

SEQ ID NO: 89 - DNA, 1479 bp, Psilocybe serbica
atgatcgtcctgttggtttctttggttttggctggttgtatctactacgctaatgctagaagagtcagaagatctagattgccaccaggtccacctggtattccattgccttttattggtaacatgttcgacatgccatctgaatctccatggttgagatttttacaatggggtagagattaccacaccgacatcttgtatttgaatgctggtggtactgagatcatcatcttgaatactttggatgccatcaccgatttgttggaaaaaaggggttctatgtactccggtagattggaatctactatggtcaatgaattgatgggttgggaattcgatttgggtttcattacttatggtgaaaggtggcgtgaagaaagaagaatgtttgccaaagaattctccgagaagaacatcagacaattcagacatgctcaaatcaaggctgccaatcaattggttagacaattgattaagaccccagacagatggtcccaacatattagacatcaaattgctgccatgtccttggatattggttacggtattgatttggctgaagatgatccttggattgctgctactcaattggctaatgaaggtttagctgaagcttctgttccaggttctttttgggttgattctttcccagctttgaaatacttgccatcttggttgccaggtgctggttttaaaagaaaagctaaggtttggaaagaaggtgccgatcatatggttaatatgccatacgaaaccatgaagaagttgaccgttcaaggtttggctagaccatcttatgcatctgctagattgcaagctatggatccagatggtgatttggaacatcaagaacacgttattagaaacaccgctaccgaagttaatgttggtggtggtgatacaactgtttctgctgtttcagctttcattttggccatggttaagtacccagaagttcaaagacaagttcaagctgaattggatgctttgacttctaaaggtgttgttccaaactacgacgaagaagatgattctttgccatacttgactgcttgcgtcaaagaaatcttcagatggaatcaaatagccccattggctattccacatagattgatcaaagatgacgtctacagaggttacttgattccaaagaatgctttggtttacgctaactcttgggctgttttgaatgatccagaagaatacccaaatccatccgaattcagaccagaaagatacttgtcatctgatggtaaaccagatccaactgttagagatccaagaaaagcagcttttggttatggtagaagaaactgcccaggtatccatttggctcaatctactgtttggatagctggtgctactttgttgtccgttttcaacattgaaagaccagttgatggtaacggtaagccaatagatattccagctactttcactaccggtttcttcagatactccattaagttgttgccctaa

SEQ ID NO: 90 - protein, 492 aa, Psilocybe serbica
MIVLLVSLVLAGCIYYANARRVRRSRLPPGPPGIPLPFIGNMFDMPSESPWLRFLQWGRDYHTDILYLNAGGTEIIILNTLDAITDLLEKRGSMYSGRLESTMVNELMGWEFDLGFITYGERWREERRMFAKEFSEKNIRQFRHAQIKAANQLVRQLIKTPDRWSQHIRHQIAAMSLDIGYGIDLAEDDPWIAATQLANEGLAEASVPGSFWVDSFPALKYLPSWLPGAGFKRKAKVWKEGADHMVNMPYETMKKLTVQGLARPSYASARLQAMDPDGDLEHQEHVIRNTATEVNVGGGDTTVSAVSAFILAMVKYPEVQRQVQAELDALTSKGVVPNYDEEDDSLPYLTACVKEIFRWNQIAPLAIPHRLIKDDVYRGYLIPKNALVYANSWAVLNDPEEYPNPSEFRPERYLSSDGKPDPTVRDPRKAAFGYGRRNCPGIHLAQSTVWIAGATLLSVFNIERPVDGNGKPIDIPATFTTGFFRYSIKLLP

SEQ ID NO: 91 - DNA, 1527 bp, Psilocybe serbica
atgatcgtcatcttggtttctttcgttttggctggttgtatctactacgctaatgctagaagagtcagaagatctagattgccaccaggtccacctggtattccattgccttttattggtaacatgttggacatgccatctgaatctccatggttgacttttttacaatggggtagagaataccagtccgacattatctatttgaatgctgctggtacggaaatgatcatcttgaatactttggaagccatcaccgatttgttggataagaggggttctatgtattccggtagattggaatctactatggtcaacaaattgatgggttgggaattcgatttcggtttcattccatatggtgaaagatggcgtgaagaaagaagaatgttcgccaaagaattctccgaaaagaacatcagacaattcagacatgctcaagttaaggctgccaatcaattggtacaacaattgattaagaccccagacagatggtcccaacatattagacatcaaattgctgccatgtccttggatattggttacggtattgatttggctgaagatgatccttggattgaagcttctttgttggctaatgaaggtttggctgttgctgctgttccaggttctttttgggttgattctttgccaattttgaagcacattccttcatggttgccaggtgctggttttaaaagaaaagctaacatgtggaaagaaggcgccgataagatggttaatatgccatacgaaacgatgaagaacttgattgctcaaggtttagctagaccatcttacgcttcagctagattgcaagaaatggatccagatggtgatttgaaacaccaagaaagagttattaagaacaccgccactcaaatcaatgttggtggtggtgatacaactgtttcagctgtttctgcttttatcttggccatggttaagtacccagaagttcaaagaaaagtccaagctgaattggatgctgttgcttctaaaggtcatgttatctccgattacgttgaagatgacactttgccatatttgaccgcttgcttgaaagaaatctttaggtggaatcaaatcgccccattggctattgctcatagattagaaaaggatgacgtctaccaaggttacaccattccaaaaaatgctttggttttcgctaactgctgggctgttttgaatgatccacaagtttatccaaatccatccgaattcagaccagaaagatatttgggtcctgatggtaaacatgatccaactgttagagatccaagaaaggctgcttttggttatggtagaagggcttgtccaggtatccatttggctcaatctactgtttggattgctggtgctactttgttgtctgctttcaacattgaaagaccagttgataagaacggcaagtccattgatattccagctacttttactaccggtttcttcagacatccagaaccatttcaatgtagattcgtcccaagaactcaagagttgttgaagccattgtctaactcctag

SEQ ID NO: 92 - protein, 508 aa, Psilocybe serbica
MIVILVSFVLAGCIYYANARRVRRSRLPPGPPGIPLPFIGNMLDMPSESPWLTFLQWGREYQSDIIYLNAAGTEMIILNTLEAITDLLDKRGSMYSGRLESTMVNKLMGWEFDFGFIPYGERWREERRMFAKEFSEKNIRQFRHAQVKAANQLVQQLIKTPDRWSQHIRHQIAAMSLDIGYGIDLAEDDPWIEASLLANEGLAVAAVPGSFWVDSLPILKHIPSWLPGAGFKRKANMWKEGADKMVNMPYETMKNLIAQGLARPSYASARLQEMDPDGDLKHQERVIKNTATQINVGGGDTTVSAVSAFILAMVKYPEVQRKVQAELDAVASKGHVISDYVEDDTLPYLTACLKEIFRWNQIAPLAIAHRLEKDDVYQGYTIPKNALVFANCWAVLNDPQVYPNPSEFRPERYLGPDGKHDPTVRDPRKAAFGYGRRACPGIHLAQSTVWIAGATLLSAFNIERPVDKNGKSIDIPATFTTGFFRHPEPFQCRFVPRTQELLKPLSNS

SEQ ID NO: 93 - DNA, 1452 bp, Panaeolus cyanescens
atgatcaacctgccattgtccttggttttggttggttgtgtttactacatcgtgtccagaagaatcagaagatctagattgccaccaggtccacctggtattccaattccatttgttggtaacatgtacgacatgccatctgaatctccatggttgacttttttacaatggggtagagagtacaacgatagaggtttgactaccatcttcagagttgaatccactatggtcaacaaattgatgggttgggaattcgatttgggtttcattacttatggtgacagatggcgtgaagaaagaaggatgttttccaaagaattctccgaaaaggccatcaagcaattcagacattctcaagttaaggctgcccatagattcgttcaacaattggctgctaatggtgaaccatcaagattgcctcattacatcagacatcaaattgctgccatgtctttggatattggttacggtgttgatttggctcaagatgatccatggttagaagctgctcatttggctaatgaaggtttggctactgcttctgttccaggtactttttggattgattctttcccagccttgaaatacttgccatcttggtttccaggtgctggttttaaaagacaagccaagatttggaaagaagccgctgatcatatggttaacatgccatacgaaaggatgaagaaattggctccacaaggtttagctagaccatcttatgcttcagctagattgcaagctatggatccaaatggtgacttggaatatcaagaacaggtcattaagaacaccgcttctcaagtaaatgttggtggtggtgatacaactgtttctgctgtttcagctttcattttggccatggttatctacccagaagttcaaagaaaagtccaagctgaattggatgccgttttgtctaatggtagaatcccagattacgacgaagaaaacgattctatgccatacttgactgcttgcgtcaaagaactgtttagatggaatcaaatagccccattggctatcccacataagttggttaaggatgatatctacaggggttacttgatcccaaagaacactttggtttttgctaactcttgggccgttttgaatgatccagaagtttatccagatccatccgtttttagaccagaaagatatttgggtccagatggtaagcctaacgatactgttagagatccaagaaaagctgctttcggttacggtagaagaaactgtccaggtattcatttggcattgtctactgtttggattactgctgctactctgttgtccgttttcgatattgaaagaccagttgatcataagggtaacccaattgatataccagctgcttttactaagggtttcttcagacatccagaaccattccaatgtagatttgtcccaagaaacgaggactctttgaaatctttgtctggcttgtga

SEQ ID NO: 94 - protein, 483 aa, Panaeolus cyanescens
MINLPLSLVLVGCVYYIVSRRIRRSRLPPGPPGIPIPFVGNMYDMPSESPWLTFLQWGREYNDRGLTTIFRVESTMVNKLMGWEFDLGFITYGDRWREERRMFSKEFSEKAIKQFRHSQVKAAHRFVQQLAANGEPSRLPHYIRHQIAAMSLDIGYGVDLAQDDPWLEAAHLANEGLATASVPGTFWIDSFPALKYLPSWFPGAGFKRQAKIWKEAADHMVNMPYERMKKLAPQGLARPSYASARLQAMDPNGDLEYQEQVIKNTASQVNVGGGDTTVSAVSAFILAMVIYPEVQRKVQAELDAVLSNGRIPDYDEENDSMPYLTACVKELFRWNQIAPLAIPHKLVKDDIYRGYLIPKNTLVFANSWAVLNDPEVYPDPSVFRPERYLGPDGKPNDTVRDPRKAAFGYGRRNCPGIHLALSTVWITAATLLSVFDIERPVDHKGNPIDIPAAFTKGFFRHPEPFQCRFVPRNEDSLKSLSGL

SEQ ID NO: 95 - DNA, 1572 bp, Orzya Sativa
atggaattgaccatggcctctactatgtctttggctttgttggttttgtctgctgcttatgttttggttgccttgagaagatcaaggtcctcttcatctaaacctagaagattgccaccatctccaccaggttggccagttattggtcacttgcatttgatgtctggtatgccacatcatgctttggctgaattggctagaactatgagagcacctttgttcagaatgagattgggttctgttccagccgttgttatttctaaaccagatttggctagagctgctttgactactaatgatgctgctttagcttctagaccacatttgttgtcaggtcagtttttgtctttcggttgttctgatgttacttttgctccagctggtccatatcatagaatggctagaagagttgttgtctccgaattattgtctgctagaagggttgctacttatggtgctgttagagtcaaagaattgagaaggttgttggctcatttgaccaagaatacttctccagctaaaccagttgatttgtccgaatgttttttgaacttggccaacgatgttttgtgcagagttgcttttggtagaagatttcctcatggtgaaggtgataagttgggtgctgttttagctgaagctcaagatttgtttgctggtttcactatcggtgatttcttcccagaattggaaccagttgcttctactgttactggtttaagacgtagattgaagaagtgcttggctgatttgagagaagcttgtgatgttatcgttgacgaacatatctctggtaacagacaaagaattccaggtgacagagatgaagatttcgttgatgtcttgttgagagtccaaaagtctcctgatttggaagttccattgaccgatgataatttgaaggccttggttttggatatgtttgttgctggtactgataccactttcgctactttggaatgggttatgacagaattggttagacacccaagaattttgaagaaggcccaagaagaagttagaagagtagtaggtgattccggtagagtagaagaatctcatttgggtgaattgcattacatgagggccattatcaaagaaaccttcagattgcatccagctgtcccattattggttccaagagaatctgttgctccatgtactttaggtggttatgatattccagccagaaccagagttttcattaacacttttgctatgggtcgtgatccagaaatttgggataatccattggaatactccccagaaagatttgaatctgccggtggtggtggcgaaattgatttgaaagatccagattacaagctgttgccatttggtggtggaagaagaggttgtccaggttatactttcgctttggctactgttcaagtttccttggcttctttgttgtaccattttgaatgggctttgccagctggtgttagagctgaagatgttaatttggacgaaacctttggtttggccaccagaaaaaaagaaccattatttgttgccgtcagaaagtctgatgcttacgaattcaaaggtgaggaattgtctgaagtctaa

SEQ ID NO: 96 - protein, 523 aa, Orzya Sativa
MELTMASTMSLALLVLSAAYVLVALRRSRSSSSKPRRLPPSPPGWPVIGHLHLMSGMPHHALAELARTMRAPLFRMRLGSVPAVVISKPDLARAALTTNDAALASRPHLLSGQFLSFGCSDVTFAPAGPYHRMARRVVVSELLSARRVATYGAVRVKELRRLLAHLTKNTSPAKPVDLSECFLNLANDVLCRVAFGRRFPHGEGDKLGAVLAEAQDLFAGFTIGDFFPELEPVASTVTGLRRRLKKCLADLREACDVIVDEHISGNRQRIPGDRDEDFVDVLLRVQKSPDLEVPLTDDNLKALVLDMFVAGTDTTFATLEWVMTELVRHPRILKKAQEEVRRVVGDSGRVEESHLGELHYMRAIIKETFRLHPAVPLLVPRESVAPCTLGGYDIPARTRVFINTFAMGRDPEIWDNPLEYSPERFESAGGGGEIDLKDPDYKLLPFGGGRRGCPGYTFALATVQVSLASLLYHFEWALPAGVRAEDVNLDETFGLATRKKEPLFVAVRKSDAYEFKGEELSEV

SEQ ID NO: 97 - DNA, 1548 bp, Persicaria tinctoria
atggaaagaaaggttggtattattggtgccggtatttctggtttgttggcttgtaaacatgctttgtctaagggtttccatccagttgttttggaagctcaaccagatattggtggtgtttgggctaatgctttggaaactactagattgcaaaccccaaaggacttctaccaattttctgattttccatggccatcctctgttcaagatatgcatccaactggtgaacaagttatggagtacattagatcctacgctgatcatttcggcttgttgaaacatgttagattcaacaccaaggtcctgtccatttcttttgaaggtacttccgatcaagagatggaagcttggtcacattggaatggtactggtgaaggttttgccaacaaaggtaaatggactttgttgttgcaagacgtcccaactcaatctcaacaagtcatggaattcaacttcgtcatcttaggtatcggtaagttctccgatagaatgagaatgccagaatttccagccggtgaaggtcctgaagtttttgatggtaaagttatccactccaaggactactctgaaaagtcttatggtgatgctagaagattggtcaagggtaagagagttgttgttgtcggttttcaaaagtccgctattgatattgccaacgaatgttcttctgccaacggtaaagaagttccttgtaacttgatctacagaactccaccatggaacattccagattttttcatatggggtctacccttgccatacttgtactttaatagattctccgagctgctgttgcataagccaggtgagggtttgtttttgtctttgttagctaccatcttgtccccattgagatggttgattgctaagtttgtcgagtccaacatcaagtacagacatccattgaaaaagtacggtttggttccagaacatggtttcggtgaagctatttcttcttgcgttttgtctgttctgccaaagggtttttacgaaaacttggaaaagggctccatcttgttgaacaaggctgaaaagttcaggttctgcaaagaaggtatagtgatggaaggtaagccaaaaccattggaagctgatttggttattttcgctactggttttgaagccgacgaaaagttgagagatatttttgcttctccaaagttccagggtcatattatgggttctccacattctatcttgcccttgtacagacaatgtatccatccacaaattccacaattggccattatcggttactctgaatctttcgctaacttgtacacctctgaaatgagatgtagatggatcgttgaattattggatggcacttttaagctgccaggtttcaaagaaatggaaaaagaaactgccaattggaacaagttcattaagggtaacgctccaaaacactacagaagatcttgtatcggtcaattgcatatctggtacaacgatcaattgtgcaaagatatgggttggaaccctagaagaaagaagggttttatttccgaatggtttcaaccacatggtccattggattacattggc

SEQ ID NO: 98 - protein, 516 aa, Persicaria tinctoria
MERKVGIIGAGISGLLACKHALSKGFHPVVLEAQPDIGGVWANALETTRLQTPKDFYQFSDFPWPSSVQDMHPTGEQVMEYIRSYADHFGLLKHVRFNTKVLSISFEGTSDQEMEAWSHWNGTGEGFANKGKWTLLLQDVPTQSQQVMEFNFVILGIGKFSDRMRMPEFPAGEGPEVFDGKVIHSKDYSEKSYGDARRLVKGKRVVVVGFQKSAIDIANECSSANGKEVPCNLIYRTPPWNIPDFFIWGLPLPYLYFNRFSELLLHKPGEGLFLSLLATILSPLRWLIAKFVESNIKYRHPLKKYGLVPEHGFGEAISSCVLSVLPKGFYENLEKGSILLNKAEKFRFCKEGIVMEGKPKPLEADLVIFATGFEADEKLRDIFASPKFQGHIMGSPHSILPLYRQCIHPQIPQLAIIGYSESFANLYTSEMRCRWIVELLDGTFKLPGFKEMEKETANWNKFIKGNAPKHYRRSCIGQLHIWYNDQLCKDMGWNPRRKKGFISEWFQPHGPLDYIG

SEQ ID NO: 99 - DNA, 1551 bp, Tabernanthe iboga
atggaaatgctgatcgtttccttcttcgccttcttgattttctgcttgatctccgttaagctgtctactaagtctaaggctgataagttgaaattgccaccaggtccaagacaattgccaattattggtaacatgcaccaaatgttaggtggtttgccacattgtgttttgagagatttggctaaaaagtacggtccattgatgcatttgaagttcggtgaagtttctaccatcgttgtttcttcaccagaaatggccaaagaggtttttcaaaagcacgatattttgttcgccgacagaccatctaatttgattgccttcaagatctcctcctacgatttcttggatattttcgcttctccctactccgattattggagacaattgagaaagatctgcaccatggaactgttgtcctctaaaagagttcagtccttcagatccattagagaaggtgaagtcttgaacttgatcagatggatctctgttcaagaaggttccgttatcaacctgtctaagaagttgttctctttgatcttcggtattattaccagagctgccttcggtaagaagaacagatacgaagaacaattccaccacttggatgaacaaatgactaagttggcttctggtttctgcattgctgatatgtatccatctgttaggttgttccaagttatgtctggtgttaagccaaagttggagaacttgcaaaaacagttggacgaaatcttgggtaacatcttggaagaacacaaagaagagtccatgaagcaaaaattaggtggtggtgaagccaaagaagatttgattgacgttttgttgaacgtccataagaggggtgattttggtgctgctttgtctaactcttctattaaggctgttatctgcaacatgttctctgctggttctgatacttcttcttctgctttggaatgggctatctccgaaatgatcaaacatccaactaccatgaagaaggctcaagacgaagttagaaacgttttccaagaaactggtaacgtcgacgaaacaaaattgggtgaattgaagtacttgcaggccgtcatcaaagaaactttgagagttcatccatctgcacctttgttggctccaagagaatgtagagaacaatgtgaaatcaacggctacactattccagctaaggctagagtttttgttaacgcttgggctattggtagagatccaatgtattggaatgaacccgaaaagttcatcccagaaagattcttgggttccgaaattgattaccaaggtaaccactatgaatacgttccatttggtggtggtagacgtgtttgtccaggtatgtcttttggtttggctaatattgctttgccattggctcaattgatctaccattttgattggaagttgccaggtgatttgaagcctgaagaattggatatgtccgaagatgtttcagctttgtctgctaggaaaaacaacttgtacatcatcccaatggtctactccagatcgttcatgaagaaagaaattaccgccgaagttatgatggacgaagcttaa

SEQ ID NO: 100 - protein, 516 aa, Tabernanthe iboga
MEMLIVSFFAFLIFCLISVKLSTKSKADKLKLPPGPRQLPIIGNMHQMLGGLPHCVLRDLAKKYGPLMHLKFGEVSTIVVSSPEMAKEVFQKHDILFADRPSNLIAFKISSYDFLDIFASPYSDYWRQLRKICTMELLSSKRVQSFRSIREGEVLNLIRWISVQEGSVINLSKKLFSLIFGIITRAAFGKKNRYEEQFHHLDEQMTKLASGFCIADMYPSVRLFQVMSGVKPKLENLQKQLDEILGNILEEHKEESMKQKLGGGEAKEDLIDVLLNVHKRGDFGAALSNSSIKAVICNMFSAGSDTSSSALEWAISEMIKHPTTMKKAQDEVRNVFQETGNVDETKLGELKYLQAVIKETLRVHPSAPLLAPRECREQCEINGYTIPAKARVFVNAWAIGRDPMYWNEPEKFIPERFLGSEIDYQGNHYEYVPFGGGRRVCPGMSFGLANIALPLAQLIYHFDWKLPGDLKPEELDMSEDVSALSARKNNLYIIPMVYSRSFMKKEITAEVMMDEA

SEQ ID NO: 101 - DNA, 2187 bp, Psilocybe cubensis
atggcttcttcttcttctgacgttttcgttttgggtttgggtgttgttttggctgctttgtacatcttcagagaccaattgttcgctgcttctaagccaaaggttgctccagtttctactactaagccagctaacggttctgctaacccaagagacttcatcgctaagatgaagcaaggtaagaagagaatcgttatcttctacggttctcaaactggtactgctgaagaatacgctatcagattggctaaggaagctaagcaaaagttcggtttggcttctttggtttgtgacccagaagaatacgacttcgaaaagttggaccaattgccagaagactctatcgctttcttcgttgttgctacttacggtgaaggtgaaccaactgacaacgctgttcaattgttgcaaaacttgcaagacgaatctttcgaattctcttctggtgaaagaaagttgtctggtttgaagtacgttgttttcggtttgggtaacaagacttacgaacactacaacttgatcggtagaactgttgacgctcaattggctaagatgggtgctatcagaatcggtgaaagaggtgaaggtgacgacgacaagtctatggaagaagactacttggaatggaaggacggtatgtgggaagctttcgctactgctatgggtgttgaagaaggtcaaggtggtgactctgctgacttcgttgtttctgaattggaatctcacccaccagaaaaggtttaccaaggtgaattctctgctagagctttgactaagactaagggtatccacgacgctaagaacccattcgctgctccaatcgctgttgctagagaattgttccaatctgttgttgacagaaactgtgttcacgttgaattcaacatcgaaggttctggtatcacttaccaacacggtgaccacgttggtttgtggccattgaacccagacgttgaagttgaaagattgttgtgtgttttgggtttggctgaaaagagagacgctgttatctctatcgaatctttggacccagctttggctaaggttccattcccagttccaactacttacggtgctgttttgagacactacatcgacatctctgctgttgctggtagacaaatcttgggtactttgtctaagttcgctccaactccagaagctgaagctttcttgagaaacttgaacactaacaaggaagaataccacaacgttgttgctaacggttgtttgaagttgggtgaaatcttgcaaatcgctactggtaacgacatcactgttccaccaactactgctaacactactaagtggccaatcccattcgacatcatcgtttctgctatcccaagattgcaaccaagatactactctatctcttcttctccaaagatccacccaaacactatccacgctactgttgttgttttgaagtacgaaaacgttccaactgaaccaatcccaagaaagtgggtttacggtgttggttctaacttcttgttgaacttgaagtacgctgttaacaaggaaccagttccatacatcactcaaaacggtgaacaaagagttggtgttccagaatacttgatcgctggtccaagaggttcttacaagactgaatctttctacaaggctccaatccacgttagaagatctactttcagattgccaactaacccaaagtctccagttatcatgatcggtccaggtactggtgttgctccattcagaggtttcgttcaagaaagagttgctttggctagaagatctatcgaaaagaacggtccagactctttggctgactggggtagaatctctttgttctacggttgtagaagatctgacgaagacttcttgtacaaggacgaatggccacaatacgaagctgaattgaagggtaagttcaagttgcactgtgctttctctagacaaaactacaagccagacggttctaagatctacgttcaagacttgatctgggaagacagagaacacatcgctgacgctatcttgaacggtaagggttacgtttacatctgtggtgaagctaagtctatgtctaagcaagttgaagaagttttggctaagatcttgggtgaagctaagggtggttctggtccagttgaaggtgttgctgaagttaagttgttgaaggaaagatctagattgatgttggacgtttggtcttaa

SEQ ID NO: 102 - protein, 728 aa, Psilocybe cubensis
MASSSSDVFVLGLGVVLAALYIFRDQLFAASKPKVAPVSTTKPANGSANPRDFIAKMKQGKKRIVIFYGSQTGTAEEYAIRLAKEAKQKFGLASLVCDPEEYDFEKLDQLPEDSIAFFVVATYGEGEPTDNAVQLLQNLQDESFEFSSGERKLSGLKYVVFGLGNKTYEHYNLIGRTVDAQLAKMGAIRIGERGEGDDDKSMEEDYLEWKDGMWEAFATAMGVEEGQGGDSADFVVSELESHPPEKVYQGEFSARALTKTKGIHDAKNPFAAPIAVARELFQSVVDRNCVHVEFNIEGSGITYQHGDHVGLWPLNPDVEVERLLCVLGLAEKRDAVISIESLDPALAKVPFPVPTTYGAVLRHYIDISAVAGRQILGTLSKFAPTPEAEAFLRNLNTNKEEYHNVVANGCLKLGEILQIATGNDITVPPTTANTTKWPIPFDIIVSAIPRLQPRYYSISSSPKIHPNTIHATVVVLKYENVPTEPIPRKWVYGVGSNFLLNLKYAVNKEPVPYITQNGEQRVGVPEYLIAGPRGSYKTESFYKAPIHVRRSTFRLPTNPKSPVIMIGPGTGVAPFRGFVQERVALARRSIEKNGPDSLADWGRISLFYGCRRSDEDFLYKDEWPQYEAELKGKFKLHCAFSRQNYKPDGSKIYVQDLIWEDREHIADAILNGKGYVYICGEAKSMSKQVEEVLAKILGEAKGGSGPVEGVAEVKLLKERSRLMLDVWS

SEQ ID NO: 103 - DNA, 2247 bp, Psilocybe serbica
atgaacgatccaaacagaaccactttttcatctgcattgcatccattggctgttgtttctatggcttcttcttcctctgatgttttcgttttaggtttgggtgttgttttggctgccttgtacatttttagagatcagttgtttgctgcctccaagccaaaagttgctccagtttctactactaagtctgctaatggttctgctaacccaagagattttgttgccaaaatgaaggaaggtaagaagcgtatcgttatcttctacggttctcaaactggtactgctgaagaatacgctattagattggctaaagaagccaagcagaaatttggtttggcttccttggtttgtgatccagaagagtacgatttcgaaaagttggatcaattgccagaagattctgctgcttttttcgttgttgctacttatggtgaaggtgaacctactgataatgccgttcaattgatgcaaaacttgcaggacgaatccttcgaattttctcaaggtgaaagaaagttgtccggtttgaagtacgttgtctttggtttaggtaacaagacctacgaacactacaacttgattggtagaactgttgatgctaagttgactgaaatgggtgctgttagaattggtgaacgtggtgagggtgatgatgataagtctatggaagaggattacttggaatggaaagatggtatgtgggatgcttttgctgctgctatgggtgttgaagaaggtcaaggcggagattcagctgactttgttgtttcagaattggaatctcatgccccagaaaaagtttacttgggtgaatattctgctagagctttgactaagaccaagggtattcatgatgctaaaaatccattcgctgctccaattgctgttgctagagaattatttcaaaccaccgctgatagaaactgcgttcatatcgaattcaacactgaaggttctggtatcacttaccaacatggtgatcacgttggtttatggccattgaatccagatgttgaagttgaaaggttgttgtgcgttttgggtttgaacgataagagagatgccgttatctctatcgaatctttggatccagctttggctaaggttccatttccagttccaacaacttatggtactgttttgagacactacatcgatatttcagctgttgccggtagacaaattttgggtactttgtctaaattcgccccaactccagaagctgaagcttatttgagaaacctgaacaccaacaaagaagaataccacagagttgttgcaaacggttgtttgaagttgggtgaaatcttgcaagttgctaccggtaacgatattactgtttctccaactccatctaacactacccaatggccaattccattcgatattatcgtttccgctattccaagattgcaacctaggtactactccatttcttcatctccaaagttgtacccaaactccattcatgctactgttgttgtcttgaaatacgaaaacgaaccagttgaacctgttccacataagtggatttttggtgttggttccaacttcctgttgaacttgaagtatgccatcaacaaagagactgctccttacattactcaaaacggtgaacaaagagttggcgttccagaatatttgattgaaggtccaagaggttcttacaagactgagacttttttcaaggccccaatccatgttagaagatctacttttagactgccaacgaatccaaagtctccagttattatgattggtccaggtactggtgttgctccttttagaggttttgttcaagaaagagttgctttggccagaaggtctattgataagaatggtccagatgctttggctgattggggtagaatttctttgttttacggttgcagaagatccgacgaagatttcttgtacaaagatgaatggccacagtacgaagaagaattgaagggtaaattcaagttgcacaccgctttctctagacaaaattacaaaccagacggctccaagatctacgttcaagatttgatttgggatgacagagaacatattgccgatgctattttgaatggtaagggttacgtttacatttgcggtgaagctaagtccatgtctaagcaagtagaagaagttctggctaagattttgggtgaagcaaaaggtggttcaggtccagttgaaggtgttgctgaagttaagttgctaaaagaaaggtccaggttgatgttggatgtttggtcttaa

SEQ ID NO: 104 - protein, 748 aa, Psilocybe serbica
MNDPNRTTFSSALHPLAVVSMASSSSDVFVLGLGVVLAALYIFRDQLFAASKPKVAPVSTTKSANGSANPRDFVAKMKEGKKRIVIFYGSQTGTAEEYAIRLAKEAKQKFGLASLVCDPEEYDFEKLDQLPEDSAAFFVVATYGEGEPTDNAVQLMQNLQDESFEFSQGERKLSGLKYVVFGLGNKTYEHYNLIGRTVDAKLTEMGAVRIGERGEGDDDKSMEEDYLEWKDGMWDAFAAAMGVEEGQGGDSADFVVSELESHAPEKVYLGEYSARALTKTKGIHDAKNPFAAPIAVARELFQTTADRNCVHIEFNTEGSGITYQHGDHVGLWPLNPDVEVERLLCVLGLNDKRDAVISIESLDPALAKVPFPVPTTYGTVLRHYIDISAVAGRQILGTLSKFAPTPEAEAYLRNLNTNKEEYHRVVANGCLKLGEILQVATGNDITVSPTPSNTTQWPIPFDIIVSAIPRLQPRYYSISSSPKLYPNSIHATVVVLKYENEPVEPVPHKWIFGVGSNFLLNLKYAINKETAPYITQNGEQRVGVPEYLIEGPRGSYKTETFFKAPIHVRRSTFRLPTNPKSPVIMIGPGTGVAPFRGFVQERVALARRSIDKNGPDALADWGRISLFYGCRRSDEDFLYKDEWPQYEEELKGKFKLHTAFSRQNYKPDGSKIYVQDLIWDDREHIADAILNGKGYVYICGEAKSMSKQVEEVLAKILGEAKGGSGPVEGVAEVKLLKERSRLMLDVWS

SEQ ID NO: 105 - DNA, 2187 bp, Panaeolus cyanescens
atggctacctcttcttctgatgccgttattttaggtgttggtgttgttttggctgccttgtacttgttcagagatcaattatttgctgcctctaagccaaaagctgttccagttacttcttctaaagcttctactggttctggtaacccaagagattttgttgctaaaatgaaggaaggcaagaagcgtatcgttatcttttacggttctcaaactggtactgctgaagaatacgctattagattggctaaagaagccaagcaaaagttcggtttagcttctttggtttgcgatccagaagagtacgatttcgaaaagttggatcaattgcctgaagattgtgctgcttttttcgttatggctacttatggtgaaggtgaacctactgataatgccgttcaattgatgcaaaacttgcaggacgaatccttcgaattttctaacggtgaacataagttggagggtttgaagtacgttgtttttggtttgggtaacaagacctacgaacactacaatttgatcggtagaaacgttgattctgctttgtctgctatgggtgctgttagaattggtgaacgtggtgagggtgatgatgataagtctatggaagaggattacttggaatggaaagatggtatgtgggaagcttttgctactgcaatgggtgttgaagaaggtcaaggcggagatactgctgatttcgttgtttctgaattggattcccatccatccgaaaaagtttacttgggtgaatattctgctagagctttgactaagaccaagggtattcatgatgctaagaatccatttccagctccaattactgtttccagagagttgttttctgtttccgctgatagaaactgcgttcacattgaattttccactgaaggttccggtattacctatcaacatggtgatcatgttggtttgtggccattgaatccagatgttgaagtcgaaagactgttgtgcgttttgggtttacatggtaagagagataccgtcattggtatcgaatctttggatccagctttggctaaggttccatttcctgttccaacaacttatggtactgttttgagacactacatcgatatttctgctgttgccggtagacaaattttgggttctttgtctaaatacgccccaactcctgaagctgaatcttacatgaagaacctgaacacgaacaaagaggaataccacaaggttgttcaagatggttgtttgaaattggccgaagttttacaattggctgctggtaacaacatcaaggttaatccaactccagaaaacactactacttgggctattccattcgacattatcgtttctgctattccaagattgcaacccaggtactactctatttcttcatctccaaagctgtacccaaactctattcatgctactgttgttgtcctgaagtacgaaaacattccatctaacaacgttccacacaaatgggtttatggtgtcggttctaatttcttgttgaacttgaaacacgcctccaacaatgaaccagttgctttacaatctccaaacggtgaagaaagaatcagctttccatcctactttatcgaaggtccaagaggtgcttacaaagctgaaccacattataaggctccaatccacgttagaagatctacttttagattgccaacgaacccaaagtctccagttattatgattggtccaggtactggtgttgctccttttagaggtttcgttcaagaaagagttgctttggcaagaaggtctttggaaaaaaatggtccagatgctttggctgattggggtagaatttctttgttctacggttgtagaaagtccaccgaagatttcttgtactctgatgaatggccaaagtacgaagaagaattgaagggcaagttcaagattcattgcgccttttctagagaaaactacaagccagatggttccaagatctatgttcaagacttgttgtgggaagatagggaaaacattgctgatgctattttgaacggtaagggttacgtttacatttgcggtgaagctaagaacatgtccaagcaagtcgaagaagttttggctaaaatcttgggtcaagctaaaggtggttccgctgaagttgaaggtgttgctgaattgaagctactgaaagaaagatccagactgatgttggacatctactcttga

SEQ ID NO: 106 - protein, 728 aa, Panaeolus cyanescens
MATSSSDAVILGVGVVLAALYLFRDQLFAASKPKAVPVTSSKASTGSGNPRDFVAKMKEGKKRIVIFYGSQTGTAEEYAIRLAKEAKQKFGLASLVCDPEEYDFEKLDQLPEDCAAFFVMATYGEGEPTDNAVQLMQNLQDESFEFSNGEHKLEGLKYVVFGLGNKTYEHYNLIGRNVDSALSAMGAVRIGERGEGDDDKSMEEDYLEWKDGMWEAFATAMGVEEGQGGDTADFVVSELDSHPSEKVYLGEYSARALTKTKGIHDAKNPFPAPITVSRELFSVSADRNCVHIEFSTEGSGITYQHGDHVGLWPLNPDVEVERLLCVLGLHGKRDTVIGIESLDPALAKVPFPVPTTYGTVLRHYIDISAVAGRQILGSLSKYAPTPEAESYMKNLNTNKEEYHKVVQDGCLKLAEVLQLAAGNNIKVNPTPENTTTWAIPFDIIVSAIPRLQPRYYSISSSPKLYPNSIHATVVVLKYENIPSNNVPHKWVYGVGSNFLLNLKHASNNEPVALQSPNGEERISFPSYFIEGPRGAYKAEPHYKAPIHVRRSTFRLPTNPKSPVIMIGPGTGVAPFRGFVQERVALARRSLEKNGPDALADWGRISLFYGCRKSTEDFLYSDEWPKYEEELKGKFKIHCAFSRENYKPDGSKIYVQDLLWEDRENIADAILNGKGYVYICGEAKNMSKQVEEVLAKILGQAKGGSAEVEGVAELKLLKERSRLMLDIYS

SEQ ID NO: 107 - DNA, 2073 bp, Catharanthus roseus
atggaatccaagttggaattggtcaggtctattgaatctgctttgggtgtttctttgggtgaagataatggtaaggttgttgttgtcgttttgactacctctttggctgttatagttggtttggttgttttcttgtggaagagatccaccgacagatctaaagaaacaaagccagttgttgtccccaaaatggtttctgctcatttggaagaagaagaggaagaagttgatccatccaaggttaaggttactgttttcttcggtactcaaactggtactgctgaaggttttgctaaagctttggctgaagaaatcaaggccagatacgaaaaggctttggttaaggtcattgatttggatgattacgctgccgatgatgaccaatacgaagaaaagttgaagaaagaaaccctggcctttttcatggttgctacttatggtgatggtgaacctactgataatgctgctagattttacaagtggttcaccgaaggtaaagaaagagaaccttggttgcaacaattgacctatggtgtttttggtttgggtaacagacaatacgaacacttcaacaagatcggtaaggttatcgacgaacaattgtctcaacaaggtgctaagagattggtccaattaggtttgggtgatgatgatcaatgcatcgaagatgattttgctgcttggagagatcaattgtggcctgaattggatcaaatcttgagagatgaagatgacatgatctctgtttctactccatataccgctgctattaacgagtacagagttgttatccacgattctttggatacaccatacgaagataagcaattgaatggtgctaacggcaacttgtcctacgatattcatcatccatgtatcgttaccgttgccgtccaaaaagaattgcataagccagaatctgacagatcctgtatccatttggaattcgatatttccggtactggtattcaatacgaaaccggtgatcatgttggtgtttacgctgaaaattgtgacgaaaatgtagaagaagctgccaagttgttgggtcaaccattggatttgattttctcattgcatgccgacaaagaggacggttcttctttaggtggttctttgccaccaccatttccaggtccatgttctttgagaactgctttggctagatatgctgatttgttgacttctccaaaaaaggctgctttgttggctttagctgcttatacttctgaaccatctgaagccgaaagattgaagtttttggcttctccacaaggtaaggatgactattctcaatgggttgttgcttctcagagatccttgttggaagttatggctgaatttccatctgctaaaccaccattgggtgtattttttgctgcaattgctccaagactgttgccaagatattactccatttcatcctcaccaagattcgttccaaatagagttcatgttacctgcgctttggtttatggtccaactccaactggtagaattcataagggtgtttgttctacctggatgaagaatgctgttccattggaaagatctccacattgctctaaagctccagttttcattagaacctccaactttaaattgccagccgatccatctgttccaattatcatgattggtcctggtactggtttggctccttttagaggttttctacaagaaaggttggtcttgaaagaagaaggcgctcaattgggtccagctttgttgttttttggttgcagaaacagaaggatggacttcatctatgaagaggaattgaagaacttcgaagatcagggtgttatctccgaattgatcgttgctttttctagagaaggtccccagaaagaatacgttcaacataagatgactgaaaaggcagctcaagtttggtctttgatttctgaaggtggttacttgtacgtttgcggtgatgctaaaggtatggctagagatgttcatagaacattgcataccatcgtccaagaacaagaaaaggctgattcttctaaagctgaagccatcgtcaaaaagttgcaaatggatggtagatacttgagggatgtttgg

SEQ ID NO: 108 - protein, 691 aa, Catharanthus roseus
MESKLELVRSIESALGVSLGEDNGKVVVVVLTTSLAVIVGLVVFLWKRSTDRSKETKPVVVPKMVSAHLEEEEEEVDPSKVKVTVFFGTQTGTAEGFAKALAEEIKARYEKALVKVIDLDDYAADDDQYEEKLKKETLAFFMVATYGDGEPTDNAARFYKWFTEGKEREPWLQQLTYGVFGLGNRQYEHFNKIGKVIDEQLSQQGAKRLVQLGLGDDDQCIEDDFAAWRDQLWPELDQILRDEDDMISVSTPYTAAINEYRVVIHDSLDTPYEDKQLNGANGNLSYDIHHPCIVTVAVQKELHKPESDRSCIHLEFDISGTGIQYETGDHVGVYAENCDENVEEAAKLLGQPLDLIFSLHADKEDGSSLGGSLPPPFPGPCSLRTALARYADLLTSPKKAALLALAAYTSEPSEAERLKFLASPQGKDDYSQWVVASQRSLLEVMAEFPSAKPPLGVFFAAIAPRLLPRYYSISSSPRFVPNRVHVTCALVYGPTPTGRIHKGVCSTWMKNAVPLERSPHCSKAPVFIRTSNFKLPADPSVPIIMIGPGTGLAPFRGFLQERLVLKEEGAQLGPALLFFGCRNRRMDFIYEEELKNFEDQGVISELIVAFSREGPQKEYVQHKMTEKAAQVWSLISEGGYLYVCGDAKGMARDVHRTLHTIVQEQEKADSSKAEAIVKKLQMDGRYLRDVW

SEQ ID NO: 109 - DNA, 2142 bp, Catharanthus roseus
atggactcctcctctgaaaaattgtctccattcgaattgatgtccgccattttgaaaggtgctaaattggatggttccaactcttctgattctggtgttgctgtttctccagctgttatggctatgttgttggagaacaaagaactggttatgatcttgactacttccgttgcagttttgattggttgcgttgttgttctgatttggagaagatcatctggttctggtaagaaggttgttgaaccaccaaaattgatcgttccaaagtctgttgtagaaccagaagaaattgacgagggtaagaagaagttcaccattttctttggtactcaaaccggtactgctgaaggttttgctaaagctttggctgaagaggctaaagctagatacgaaaaggctgttatcaaggttatcgacattgatgattacgctgccgatgatgaagaatacgaagagaagttcagaaaagaaaccttggccttcttcattttggctacttatggtgatggtgaacctactgataatgctgctagattttacaagtggttcgttgaaggtaacgatagaggtgactggttgaaaaacttgcaatacggtgtttttggtttgggcaacagacaatacgaacacttcaacaagattgctaaggttgtcgacgaaaaggttgctgaacaaggtggtaaaagaatcgttccattggttttgggtgatgatgatcaatgcatcgaagatgattttgctgcttggagagaaaatgtttggccagaattggataacttgttgagggatgaagatgataccactgtttctactacttacactgctgctattccagagtacagagttgtttttccagataagtccgactccttgatttctgaagctaatggtcatgctaatggttacgctaacggtaacactgtttatgatgctcaacatccatgcagatctaacgttgctgttagaaaagaattgcatactccagcctctgatagatcttgtactcatttggatttcgatattgccggtactggtttgtcttatggtactggtgatcatgttggtgtttactgtgacaacttgtctgaaactgttgaagaagctgaacgtttgttgaatttgccaccagaaacttacttctcattgcatgctgacaaagaagatggtactccattggctggttcttcattgccaccaccatttccaccatgtactttgagaactgctttgactagatacgccgatttgttgaacactccaaagaaatctgctttgttggctttagctgcttatgcttctgatcctaatgaagccgatagattgaaatacttggcttctccagcaggtaaagatgaatatgctcaatccttggttgctaaccagagaagtttgttggaagttatggctgaatttccatctgctaaaccaccattgggtgttttttttgctgcaattgctccaagattgcagccaagattttactccatttctagctctccaagaatggccccatctagaattcatgttacttgtgctttggtctacgaaaaaactccaggtggtagaattcacaagggtgtttgttctacttggatgaagaacgctattccattggaagaatctagagattgctcttgggctccaattttcgttagacaatctaactttaagttgcccgctgatccaaaggttccagttattatgattggtccaggtacaggtttggctccttttagaggttttctacaagaaaggttggccttgaaagaagaaggcgctgaattgggtacagccgtattcttttttggttgtcgtaacagaaagatggactacatctacgaagatgaactgaaccacttcttggaaattggtgctttgtccgaattattggttgccttttctagagaaggtcctaccaaacaatacgtccaacataagatggctgaaaaggcatctgatatttggaggatgatttcagatggtgcctacgtttatgtttgcggtgatgctaaaggtatggctagagatgttcatagaaccttgcataccattgctcaagaacaaggttcaatggattctactcaagcagaaggtttcgtcaagaacttgcaaatgactggtagatacttgagagatgtctgg

SEQ ID NO: 110 - protein, 714 aa, Catharanthus roseus
MDSSSEKLSPFELMSAILKGAKLDGSNSSDSGVAVSPAVMAMLLENKELVMILTTSVAVLIGCVVVLIWRRSSGSGKKVVEPPKLIVPKSVVEPEEIDEGKKKFTIFFGTQTGTAEGFAKALAEEAKARYEKAVIKVIDIDDYAADDEEYEEKFRKETLAFFILATYGDGEPTDNAARFYKWFVEGNDRGDWLKNLQYGVFGLGNRQYEHFNKIAKVVDEKVAEQGGKRIVPLVLGDDDQCIEDDFAAWRENVWPELDNLLRDEDDTTVSTTYTAAIPEYRVVFPDKSDSLISEANGHANGYANGNTVYDAQHPCRSNVAVRKELHTPASDRSCTHLDFDIAGTGLSYGTGDHVGVYCDNLSETVEEAERLLNLPPETYFSLHADKEDGTPLAGSSLPPPFPPCTLRTALTRYADLLNTPKKSALLALAAYASDPNEADRLKYLASPAGKDEYAQSLVANQRSLLEVMAEFPSAKPPLGVFFAAIAPRLQPRFYSISSSPRMAPSRIHVTCALVYEKTPGGRIHKGVCSTWMKNAIPLEESRDCSWAPIFVRQSNFKLPADPKVPVIMIGPGTGLAPFRGFLQERLALKEEGAELGTAVFFFGCRNRKMDYIYEDELNHFLEIGALSELLVAFSREGPTKQYVQHKMAEKASDIWRMISDGAYVYVCGDAKGMARDVHRTLHTIAQEQGSMDSTQAEGFVKNLQMTGRYLRDVW

SEQ ID NO: 111 - DNA, 2079 bp, Fusarium oxysporum
atggcagaattagatacacttgatatagtagtattaggtgttatctttttgggtactgtggcatactttactaagggtaaattgtggggtgttaccaaggatccatacgctaacggattcgctgcaggtggtgcttccaagcctggcagaactagaaacatcgtcgaagctatggaggaatcaggtaaaaactgtgttgttttctacggcagtcaaacaggtacagcggaggattacgcatcaagacttgcaaaggaaggaaagtccagattcggtttgaacactatgatcgccgatctagaagattatgacttcgataacttagacactgttccatctgataacatcgttatgtttgtattggctacttacggtgaaggcgaaccaacagataacgccgtggatttctatgagttcattactggcgaagatgcctctttcaatgagggcaacgatcctccactaggtaacttgaattacgttgcgttcggtctgggcaacaatacctacgaacactacaactcaatggtcaggaacgttaacaaggctctagaaaagttaggagctcatagaattggagaagcaggtgagggtgacgacggagctggaactatggaagaggactttttagcttggaaagatccaatgtgggaagccttggctaaaaagatgggcttggaggaaagagaagctgtatatgaacctattttcgctatcaatgagagagatgatttgacccctgaagcgaatgaggtatacttgggagaacctaataagctacacttggaaggtacagcgaaaggtccattcaactcccacaacccatatatcgcaccaattgcagaatcatacgaacttttctcagctaaggatagaaattgtctgcatatggaaattgatatttctggtagtaatctaaagtatgaaacaggcgaccatatcgcgatctggcctaccaacccaggtgaagaggtcaacaaatttcttgacattctagatctgtctggtaagcaacattccgtcgtaacagtgaaagccttagaacctacagccaaagttccttttccaaatccaactacctacgatgctatattgagataccatctggaaatatgcgctccagtttctagacagtttgtctcaactttagcagcattcgcccctaatgatgatatcaaagctgagatgaaccgtttgggatcagacaaagattacttccacgaaaagacaggaccacattactacaatatcgctagatttttggcctcagtctctaaaggtgaaaaatggacaaagataccattttctgctttcatagaaggccttacaaaactacaaccaagatactattctatctcttcctctagtttagttcagcctaaaaagattagtattactgctgttgtcgaatctcagcaaattccaggtagagatgacccattcagaggtgtagcgactaactacttgttcgctttgaagcagaaacaaaacggtgatccaaatccagctccttttggccaatcatacgagttgacaggaccaaggaataagtatgatggtatacatgttccagtccatgtaagacattctaactttaagctaccatctgatccaggcaaacctattatcatgatcggtccaggtaccggtgttgccccttttagaggcttcgtccaagagagggcaaaacaagccagagatggtgtagaagttggtaaaacactgctgttctttggatgtagaaagagtacagaagatttcatgtatcaaaaagagtggcaagagtacaaggaagctcttggcgacaaattcgaaatgattacagctttttcaagagaaggatctaaaaaggtttatgttcaacacagactgaaggaaagatcaaaggaagtttctgatcttctatcccaaaaagcatacttctacgtttgcggagacgccgcacatatggcacgtgaagtgaacactgtgttagcacagatcatagcagaaggccgtggtgtatcagaagccaagggtgaggaaattgtcaaaaacatgagatcagcaaatcaataccaagaggatgtctggagttaa

SEQ ID NO: 112 - protein, 692 aa, Fusarium oxysporum
MAELDTLDIVVLGVIFLGTVAYFTKGKLWGVTKDPYANGFAAGGASKPGRTRNIVEAMEESGKNCVVFYGSQTGTAEDYASRLAKEGKSRFGLNTMIADLEDYDFDNLDTVPSDNIVMFVLATYGEGEPTDNAVDFYEFITGEDASFNEGNDPPLGNLNYVAFGLGNNTYEHYNSMVRNVNKALEKLGAHRIGEAGEGDDGAGTMEEDFLAWKDPMWEALAKKMGLEEREAVYEPIFAINERDDLTPEANEVYLGEPNKLHLEGTAKGPFNSHNPYIAPIAESYELFSAKDRNCLHMEIDISGSNLKYETGDHIAIWPTNPGEEVNKFLDILDLSGKQHSVVTVKALEPTAKVPFPNPTTYDAILRYHLEICAPVSRQFVSTLAAFAPNDDIKAEMNRLGSDKDYFHEKTGPHYYNIARFLASVSKGEKWTKIPFSAFIEGLTKLQPRYYSISSSSLVQPKKISITAVVESQQIPGRDDPFRGVATNYLFALKQKQNGDPNPAPFGQSYELTGPRNKYDGIHVPVHVRHSNFKLPSDPGKPIIMIGPGTGVAPFRGFVQERAKQARDGVEVGKTLLFFGCRKSTEDFMYQKEWQEYKEALGDKFEMITAFSREGSKKVYVQHRLKERSKEVSDLLSQKAYFYVCGDAAHMAREVNTVLAQIIAEGRGVSEAKGEEIVKNMRSANQYQEDVWS

SEQ ID NO: 113 - DNA, 1092 bp, Arabidopsis thaliana
atgggttctactgctgaaactcaattgactccagttcaagttactgatgatgaagctgctttgttcgctatgcaattggcttctgcttctgttttgccaatggctttgaaatctgctttggaattggacttgttggaaatcatggctaagaatggttctccaatgtctccaactgaaattgcttctaagttgccaactaagaatcctgaagctccagttatgttggatagaatcttgaggttgttgacctcctactctgttttgacttgttccaacagaaagttgtctggtgatggtgttgaaagaatctatggtttgggtccagtctgtaagtacttgactaagaatgaagatggtgtttccattgctgccttgtgcttgatgaatcaagataaggttttgatggaatcctggtatcatttgaaggatgccattttggatggtggtattccattcaacaaagcctatggtatgtctgcctttgaatatcatggtactgatccaagattcaacaaggtgtttaacaacggtatgtccaaccattctaccattaccatgaagaagatcctggaaacttacaagggtttcgaaggtttgacttccttggttgatgttggtggtggaattggtgctactttgaaaatgatcgttagcaagtacccaaacttgaagggtatcaatttcgatttgccacacgttattgaagatgctccatctcatccaggtattgaacatgtaggtggtgatatgtttgtttccgttccaaaaggtgatgccatctttatgaagtggatttgccatgattggtccgatgaacattgtgtcaagtttttgaagaactgctacgaatccttgccagaagatggtaaagttattttggccgaatgcatcttaccagaaactccagattcttccttgtccaccaaacaagttgttcatgttgattgcattatgctggctcataatccaggtggtaaagaaagaaccgaaaaagaatttgaagctttggctaaggcttctggtttcaagggtattaaggttgtttgtgatgctttcggtgttaacttgatcgagttgttgaagaagctgtaa

SEQ ID NO: 114 - protein, 363 aa, Arabidopsis thaliana
MGSTAETQLTPVQVTDDEAALFAMQLASASVLPMALKSALELDLLEIMAKNGSPMSPTEIASKLPTKNPEAPVMLDRILRLLTSYSVLTCSNRKLSGDGVERIYGLGPVCKYLTKNEDGVSIAALCLMNQDKVLMESWYHLKDAILDGGIPFNKAYGMSAFEYHGTDPRFNKVFNNGMSNHSTITMKKILETYKGFEGLTSLVDVGGGIGATLKMIVSKYPNLKGINFDLPHVIEDAPSHPGIEHVGGDMFVSVPKGDAIFMKWICHDWSDEHCVKFLKNCYESLPEDGKVILAECILPETPDSSLSTKQVVHVDCIMLAHNPGGKERTEKEFEALAKASGFKGIKVVCDAFGVNLIELLKKL

SEQ ID NO: 115 - DNA, 1122 bp, Arabidopsis thaliana
atgggctacttgttccaagaaaccttgtcctctaatccaaagactccaatcgttgttgatgacgataatgagttgggtttgatggctgttagattggctaatgctgctgcttttccaatggttttgaaagctgctttggaattgggtgttttcgataccttgtatgctgcagcttctagaactgattctttcttgtctccatacgaaatcgcttctaagttgccaactactccaagaaatccagaagctccagttttgttggatagaatgttgagattactggcctcttactctatggttaagtgtggtaaagctttgtctggtaaaggtgaaagagtttacagagctgaacctatctgtaggttcttcttgaaggataacatccaagacattggttccttggcttctcaagttatcgttaacttcgactccgttttcttgaatacttgggctcaattgaaggatgttgttttggaaggtggtgatgcttttggtagagcacatggtggtatgaagttgtttgattatatgggtactgacgagaggttctccaagttgtttaatcaaactggtttcaccattgccgttgtcaaaaaagctttggaagtttacgaaggtttcaagggtgttaaggttttggttgatgttggtggtggtgttggtaatactttgggtgttgttacttctaagtacccaaacatcaagggtatcaacttcgatttgacttgtgctttggctcaagctccatcttatccaggtgttgaacatgttgctggtgatatgtttgttgatgttccaacaggtgatgccatgatcttgaaaagaatattgcatgattggaccgacgaagattgcgttaagattttgaaaaactgctggaagtccttgccagaaaatggtaaggttgttgttatcgaattggttaccccagatgaagctgaaaacggtgatattaacgctaacattgccttcgatatggacatgttaatgttcacccaatgctctggtggtaaagaaagatctagagctgaatttgaagctttggctgctgcatctggttttactcattgcaagtttgtttgtcaagcttaccattgctggatcatcgaattctgtaagtaa

SEQ ID NO: 116 - protein, 373 aa, Arabidopsis thaliana
MGYLFQETLSSNPKTPIVVDDDNELGLMAVRLANAAAFPMVLKAALELGVFDTLYAAASRTDSFLSPYEIASKLPTTPRNPEAPVLLDRMLRLLASYSMVKCGKALSGKGERVYRAEPICRFFLKDNIQDIGSLASQVIVNFDSVFLNTWAQLKDVVLEGGDAFGRAHGGMKLFDYMGTDERFSKLFNQTGFTIAVVKKALEVYEGFKGVKVLVDVGGGVGNTLGVVTSKYPNIKGINFDLTCALAQAPSYPGVEHVAGDMFVDVPTGDAMILKRILHDWTDEDCVKILKNCWKSLPENGKVVVIELVTPDEAENGDINANIAFDMDMLMFTQCSGGKERSRAEFEALAAASGFTHCKFVCQAYHCWIIEFCK

SEQ ID NO: 117 - DNA, 1038 bp, Homo sapiens
atgggttcctctgaagatcaagcctacagattattgaacgattacgctaacggtttcatggtgtctcaagttttgtttgctgcttgtgaattgggtgttttcgatttgttggctgaagctccaggtccattggatgttgctgctgttgcagctggtgttagagcttctgctcatggtactgaattgctgttggatatttgcgtgtctctgaagttgttgaaggttgaaactagaggtggtaaggctttctacagaaacactgaattgtcctctgattacttgactactgtttctccaacctctcaatgctctatgttgaagtatatgggtagaacctcttacagatgttggggtcatttggctgatgctgttagagaaggtagaaatcaatacttggaaacctttggtgttccagctgaagaattattcactgccatatacagatccgaaggtgaaagattgcaattcatgcaagccttgcaagaggtttggtctgttaatggtagatctgttttgactgctttcgacttgtctgttttcccattgatgtgtgacttaggtggtggtgctggtgctttggctaaagaatgtatgtcattatacccaggttgcaagatcaccgttttcgatattccagaagttgtttggactgccaagcaacattttagcttccaagaagaagaacagatcgatttccaagagggtgattttttcaaagacccattgccagaagctgacttgtatattttggccagagttttacatgattgggccgatggtaaatgctctcatttgttggaaagaatctaccatacttgtaagcctggtggtggtattttggttatcgaatctttgttggacgaagatagaagaggtccattattgactcagctgtactctttgaacatgttggttcaaactgaaggtcaagaaagaaccccaactcattaccatatgttgttgtcatctgctggtttcagagacttccaattcaaaaaaactggtgctatctacgatgccatcttggctagaaagtaa

SEQ ID NO: 118 - protein, 345 aa, Homo sapiens
MGSSEDQAYRLLNDYANGFMVSQVLFAACELGVFDLLAEAPGPLDVAAVAAGVRASAHGTELLLDICVSLKLLKVETRGGKAFYRNTELSSDYLTTVSPTSQCSMLKYMGRTSYRCWGHLADAVREGRNQYLETFGVPAEELFTAIYRSEGERLQFMQALQEVWSVNGRSVLTAFDLSVFPLMCDLGGGAGALAKECMSLYPGCKITVFDIPEVVWTAKQHFSFQEEEQIDFQEGDFFKDPLPEADLYILARVLHDWADGKCSHLLERIYHTCKPGGGILVIESLLDEDRRGPLLTQLYSLNMLVQTEGQERTPTHYHMLLSSAGFRDFQFKKTGAIYDAILARK

SEQ ID NO: 119 - DNA, 1071 bp, Tabernanthe iboga
gatgctatgaagtctgctgagttgtttaaagctcaagcccatatcttcaagcaggttttctgttttactaatggcgcttctttgaagtgcgctgttcaattgggtattccagatgctattgataaccatggtaaggctatgaccttgtctgaattgactgatgctttgccaatcaatccatctaaggctccacatatccatagattgatgagaattttggttaccgccggtttcttcgttgaagaaagattaggtaacggcaaagaagaaaaggctaacggttatgctttgactccatcttctagactgttgttgaaaaacaagcccttgtctttgagagcttctgctttaactatgttggatccagttactgttaagacctggaatgctttgtcagaatggttccaaaacgaagatcaaactgctttcgaaactgctcatggtaagaatatgtgggattttttcgctgaagatccaggcttgtctaaaaagttcaatgaatccatggcctccgattctcaattggttactgaagttttggtcaccaagtgcaagtttgttttcgaaggtttgacttccatggttgatgttggtggtggtactggtactgttgctggtgctattgctaaaacttttccatctttgagatgcaccgttttcgatttgccacatgttgttgctaatttggaacctaccgaaaacttggattttgttgccggtgatatgttcggtaaaattccaccagctaacgccatttttttgaagtgggttttacacgattggaacgatgaagattgcgtgaagattttgaagaactgcaagagagctatcccaggtaaagaaaaaggtggtaaggttatcatcgtcgacattatcatggaaaccgaaaagcacgatatcgacgaatttgattacgctaagatgtgcatggacatggaaatgttggttctgtgcaactctaaagaaaggaccgaaaaagaattggccatgttggtttctgaagctggtttttctggttacaagatctttccagttttgggcatcagatccttgattgaagtttacccatga

SEQ ID NO: 120 - protein, 356 aa, Tabernanthe iboga
DAMKSAELFKAQAHIFKQVFCFTNGASLKCAVQLGIPDAIDNHGKAMTLSELTDALPINPSKAPHIHRLMRILVTAGFFVEERLGNGKEEKANGYALTPSSRLLLKNKPLSLRASALTMLDPVTVKTWNALSEWFQNEDQTAFETAHGKNMWDFFAEDPGLSKKFNESMASDSQLVTEVLVTKCKFVFEGLTSMVDVGGGTGTVAGAIAKTFPSLRCTVFDLPHVVANLEPTENLDFVAGDMFGKIPPANAIFLKWVLHDWNDEDCVKILKNCKRAIPGKEKGGKVIIVDIIMETEKHDIDEFDYAKMCMDMEMLVLCNSKERTEKELAMLVSEAGFSGYKIFPVLGIRSLIEVYP

SEQ ID NO: 121 - DNA, 792 bp, Oryctolagus cuniculus
atggaaggtggtttcactggtggtgacgaataccaaaagcacttcttgccaagagactacttgaacacttactactctttccaatctggtccatctccagaagctgaaatgttgaagttcaacttggaatgtttgcacaagactttcggtccaggtggtttgcaaggtgacactttgatcgacatcggttctggtccaactatctaccaagttttggctgcttgtgaatctttcaaggacatcactttgtctgacttcactgacagaaacagagaagaattggctaagtggttgaagaaggaaccaggtgcttacgactggactccagctttgaagttcgcttgtgaattggaaggtaactctggtagatggcaagaaaaggctgaaaagttgagagctactgttaagagagttttgaagtgtgacgctaacttgtctaacccattgactccagttgttttgccaccagctgactgtgttttgactttgttggctatggaatgtgcttgttgttctttggacgcttacagagctgctttgagaaacttggcttctttgttgaagccaggtggtcacttggttactactgttactttgcaattgtcttcttacatggttggtgaaagagaattctcttgtgttgctttggaaaaggaagaagttgaacaagctgttttggacgctggtttcgacatcgaacaattgttgtactctccacaatcttactctgcttctactgctccaaacagaggtgtttgtttcttggttgctagaaagaagccaggttcttaa

SEQ ID NO: 122 - protein, 263 aa, Oryctolagus cuniculus
MEGGFTGGDEYQKHFLPRDYLNTYYSFQSGPSPEAEMLKFNLECLHKTFGPGGLQGDTLIDIGSGPTIYQVLAACESFKDITLSDFTDRNREELAKWLKKEPGAYDWTPALKFACELEGNSGRWQEKAEKLRATVKRVLKCDANLSNPLTPVVLPPADCVLTLLAMECACCSLDAYRAALRNLASLLKPGGHLVTTVTLQLSSYMVGEREFSCVALEKEEVEQAVLDAGFDIEQLLYSPQSYSASTAPNRGVCFLVARKKPGS

SEQ ID NO: 123 - DNA, 930 bp, Psilocybe cubensis
atgcacatcagaaacccatacagaactccaatcgactaccaagctttgtctgaagctttcccaccattgaagccattcgtttctgttaacgctgacggtacttcttctgttgacttgactatcccagaagctcaaagagctttcactgctgctttgttgcacagagacttcggtttgactatgactatcccagaagacagattgtgtccaactgttccaaacagattgaactacgttttgtggatcgaagacatcttcaactacactaacaagactttgggtttgtctgacgacagaccaatcaagggtgttgacatcggtactggtgcttctgctatctacccaatgttggcttgtgctagattcaaggcttggtctatggttggtactgaagttgaaagaaagtgtatcgacactgctagattgaacgttgttgctaacaacttgcaagacagattgtctatcttggaaacttctatcgacggtccaatcttggttccaatcttcgaagctactgaagaatacgaatacgaattcactatgtgtaacccaccattctacgacggtgctgctgacatgcaaacttctgacgctgctaagggtttcggtttcggtgttggtgctccacactctggtactgttatcgaaatgtctactgaaggtggtgaatctgctttcgttgctcaaatggttagagaatctttgaagttgagaactagatgtagatggtacacttctaacttgggtaagttgaagtctttgaaggaaatcgttggtttgttgaaggaattggaaatctctaactacgctatcaacgaatacgttcaaggttctactagaagatacgctgttgcttggtctttcactgacatccaattgccagaagaattgtctagaccatctaacccagaattgtcttctttgttctaa

SEQ ID NO: 124 - protein, 309 aa, Psilocybe cubensis
MHIRNPYRTPIDYQALSEAFPPLKPFVSVNADGTSSVDLTIPEAQRAFTAALLHRDFGLTMTIPEDRLCPTVPNRLNYVLWIEDIFNYTNKTLGLSDDRPIKGVDIGTGASAIYPMLACARFKAWSMVGTEVERKCIDTARLNVVANNLQDRLSILETSIDGPILVPIFEATEEYEYEFTMCNPPFYDGAADMQTSDAAKGFGFGVGAPHSGTVIEMSTEGGESAFVAQMVRESLKLRTRCRWYTSNLGKLKSLKEIVGLLKELEISNYAINEYVQGSTRRYAVAWSFTDIQLPEELSRPSNPELSSLF

SEQ ID NO: 125 - DNA, 969 bp, Psilocybe serbica
atgcacatcagaaacccatacagagatggtgttgattatcaagctttggctgaagcttttccagctttgaaaccacaatgtgtcttgctgttgttttctttcaccccaatcattaacatgaaggccgatacaaaaagagtcaggttgtatactgctgccttgttgcatagagatttcggtttgactattaccttgccagaggatagattgtgtccaaccgttttacatttgttgaccgccatttctagactgaactatgttttgtgggtcgaagatattttgaaggttacctctgatgctttgggtttgccagataatagacaagttaagggtatcgatattggtactggtgcttctgctatctatccaatgttggcttgttctagattcaagacctggtctatggttgctactggtacaggtgttgatcaaaagtgtattgataccgccagattgaacgttattgccaacaacttgcaagaaaggttggctattattgccacttctgttgatggtccaattttggttccattattgcaagccaactccgatttcgaatacgatttcactatgtgtaacccacctttttacgatggtgcttcagatatgcaaacttccgatgctgctaaaggttttggttttggtgttaatgctccacatactggtactgttttggaaatggctactgaaggtggtgaatctgcttttgttgctcaaatggttagggaatccttgaacttgcaaactagatgtagatggttcacctccaacttgggtaaattgaagtccttgtacgaaatcgtcggtttgttgagagaacaccaaatttctaactacgccatcaacgaatatgttcaaggtgctactagaagatacgctattgcttggtctttcatcgatgttagattgccagatgttagaccattgcattccttgcattgtcgttggagaatcaacagattgatctaa

SEQ ID NO: 126 - protein, 322 aa, Psilocybe serbica
MHIRNPYRDGVDYQALAEAFPALKPQCVLLLFSFTPIINMKADTKRVRLYTAALLHRDFGLTITLPEDRLCPTVLHLLTAISRLNYVLWVEDILKVTSDALGLPDNRQVKGIDIGTGASAIYPMLACSRFKTWSMVATGTGVDQKCIDTARLNVIANNLQERLAIIATSVDGPILVPLLQANSDFEYDFTMCNPPFYDGASDMQTSDAAKGFGFGVNAPHTGTVLEMATEGGESAFVAQMVRESLNLQTRCRWFTSNLGKLKSLYEIVGLLREHQISNYAINEYVQGATRRYAIAWSFIDVRLPDVRPLHSLHCRWRINRLI

SEQ ID NO: 127 - DNA, 954 bp, Panaeolus cyanescens
atgcacaacagaaacccatacagagatgttattgattaccaagctttggctgaagcttacccaccattgaaaccacatgttactgttaacgctgataacaccgcttctatcgatttgactattccagaagttcaaagacagtacactgctgctttgttgcatagagattttggtttgaccattaccttgccagaggatagattgtgtccaactgttccaaatagactgaactacgttttgtggatcgaggatattttccaatgtaccaacaaggctttgggtttgtctgatgatagaccagttaagggtgttgatattggtactggtgcttctgctatctatccaatgttggcttgtgctagattcaagcaatggtctatgattgctaccgaagttgaaagaaagtgcattgatactgccagattgaacgttttggctaacaacttgcaagacaggttgtccattttggaagtttcagttgatggtccaattctggttccaattttcgatacctttgaaagggctacctctgattacgaatttgaattcactatgtgcaacccacctttttatgatggtgctgctgatatgcaaacttccgatgctgctaaaggttttggttttggtgttaatgctccacactctggtactgttattgaaatggctactgaaggtggtgaagcagcttttgttgctcaaatggttagagaatccatgaagttgcaaaccagatgtagatggttcacttccaacttgggtaaattgaagtcattgcacgaaatcgttgccttgttgagagaatctcaaattaccaactacgccatcaacgaatacgttcaaggtactactagaagatatgctttggcttggtctttcaccgatattaagttgactgaagagttgtacagaccatctaatccagaattaggtccattgtgttctaccttcgtttaa

SEQ ID NO: 128 - protein, 317 aa, Panaeolus cyanescens
MHNRNPYRDVIDYQALAEAYPPLKPHVTVNADNTASIDLTIPEVQRQYTAALLHRDFGLTITLPEDRLCPTVPNRLNYVLWIEDIFQCTNKALGLSDDRPVKGVDIGTGASAIYPMLACARFKQWSMIATEVERKCIDTARLNVLANNLQDRLSILEVSVDGPILVPIFDTFERATSDYEFEFTMCNPPFYDGAADMQTSDAAKGFGFGVNAPHSGTVIEMATEGGEAAFVAQMVRESMKLQTRCRWFTSNLGKLKSLHEIVALLRESQITNYAINEYVQGTTRRYALAWSFTDIKLTEELYRPSNPELGPLCSTFV

SEQ ID NO: 129 - DNA, 930 bp, Psilocybe cubensis
atgcacatcagaaacccatacagaactccaatcgactaccaagctttgtctgaagctttcccaccattgaagccattcgtttctgttaacgctgacggtacttcttctgttgacttgactatcccagaagctcaaagagctttcactgctgctttgttgcacagagacttcggtttgactatgactatcccagaagacagattgtgtccaactgttccaaacagattgaactacgttttgtggatcgaagacatcttcaactacactaacaagactttgggtttgtctgacgacagaccaatcaagggtgttgacatcggtactggtgcttctgctatctacccaatgttggcttgtgctagattcaaggcttggtctatggttggtactgaagttgaaagaaagtgtatcgacactgctagattgaacgttgttgctaacaacttgcaagacagattgtctatcttggaaacttctatcgacggtccaatcttggttccaatcttcgaagctactgaagaatacgaatacgaattcactatgtgtaacccaccattctacgacggtgctgctgacatgcaaacttctgacgctgctaagggtttcggtttcggtgttggtgctccagcttctggtactgttatcgaaatgtctactgaaggtggtgaatctgctttcgttgctcaaatggttagagaatctttgaagttgagaactagatgtagatggtacacttctaacttgggtaagttgaagtctttgaaggaaatcgttggtttgttgaaggaattggaaatctctaactacgctatcaacgaatacgttcaaggttctactagaagatacgctgttgcttggtctttcactgacatccaattgccagaagaattgtctagaccatctaacccagaattgtcttctttgttctaa

SEQ ID NO: 130 - protein, 309 aa, Psilocybe cubensis
MHIRNPYRTPIDYQALSEAFPPLKPFVSVNADGTSSVDLTIPEAQRAFTAALLHRDFGLTMTIPEDRLCPTVPNRLNYVLWIEDIFNYTNKTLGLSDDRPIKGVDIGTGASAIYPMLACARFKAWSMVGTEVERKCIDTARLNVVANNLQDRLSILETSIDGPILVPIFEATEEYEYEFTMCNPPFYDGAADMQTSDAAKGFGFGVGAPASGTVIEMSTEGGESAFVAQMVRESLKLRTRCRWYTSNLGKLKSLKEIVGLLKELEISNYAINEYVQGSTRRYAVAWSFTDIQLPEELSRPSNPELSSLF

SEQ ID NO: 131 - DNA, 1077 bp, Psilocybe serbica
atgccaagaatccaagttttggacatcaggggttctaaagaatctgttggttctactccacatttgagagctgctattttggaaggtttgttgaaaccaccaggttcaagaactttgccatctgaaacattatacgacgaagtcggtttgaagatgtacaacgatggtatgaaggcttgggctgaatggtattatccagttgaagctgaaagacagatcttggaaagatacggtagagatattgctaagttgttcactacttccgctaaaggtaaggccgttttgattgaattaggtgctggttctttggacaagacctctcaagttttgttgtctgctgctgaaattactagaactactggtcccatgaacaacattgcttattacgctttggatttggaaaggggtgaattggaaagaaccattggtagattgcaagaggttatcggtgatcaaattgccggtaaaatttctactgctggtatgtggggtacttacgatgatggtattagagtcatcgaaaagaacgaattggaattggaaccagatatcccagttcacatcttgtttttaggtggtactatcggcaacttctctaagcaagatggtgatgttgctttcttgaagtctttgccattggatcataagagaggtgatactttgttggttggtatggatagacataagtccgctgatgctattgaaagatcttatggttttgctgctgccaaggattggattatgaatggtttgaaagtttccggtagagttttgactggtgatgagggtttgtttgaaattggtaattgggagagatacgccaagtacaatgaagaattgggtagatatgaagccggttacaagtcccaaaaagaacatgctttgaagatctccgaaggtgttgatattaccttcttgaaggatgaagttgtcctggtcatgttctctaacaagtatactgatgccgaaatggattccgttgttgattctgctggtttggttaagaatggttcatggatggacgaaaaggctcaatactgtttgttgtcattgagagctaacaacggtccagtttga

SEQ ID NO: 132 - protein, 358 aa, Psilocybe serbica
MPRIQVLDIRGSKESVGSTPHLRAAILEGLLKPPGSRTLPSETLYDEVGLKMYNDGMKAWAEWYYPVEAERQILERYGRDIAKLFTTSAKGKAVLIELGAGSLDKTSQVLLSAAEITRTTGPMNNIAYYALDLERGELERTIGRLQEVIGDQIAGKISTAGMWGTYDDGIRVIEKNELELEPDIPVHILFLGGTIGNFSKQDGDVAFLKSLPLDHKRGDTLLVGMDRHKSADAIERSYGFAAAKDWIMNGLKVSGRVLTGDEGLFEIGNWERYAKYNEELGRYEAGYKSQKEHALKISEGVDITFLKDEVVLVMFSNKYTDAEMDSVVDSAGLVKNGSWMDEKAQYCLLSLRANNGPV

SEQ ID NO: 133 - DNA, 966 bp, Mycobacterium smegmatis
atgactttgtccttggctaattacttggctgctgattctgctgctgaagctttgagaagagatgttagagctggtttgactgctgctccaaaatctttgccaccaaaatggttttatgatgccgttggttctgatttgttcgatcagattactagattgccagagtactacccaactagaactgaagctcaaattttgagaaccagatccgctgaaattattgctgctgctggtgctgatactttggttgaattaggttctggtacttccgaaaagaccagaatgttgttggatgctatgagagatgccgaattgctgagaagattcattccatttgatgttgatgccggtgttttgagatcagctggtgcagctattggtgctgaatatccaggtattgaaattgatgctgtttgcggtgatttcgaagaacatttgggtaagattccacacgttggtagaagattggttgttttcttgggttctaccattggtaatttgactccagctccaagagctgaatttttgtctactttggctgataccttgcaaccaggtgattctttgttgttgggtactgatttggttaaggataccggtagattggttagagcttatgatgatgcagctggtgttacagctgcttttaatagaaatgttttggccgtcgtcaacagagaattgtctgctgattttgatttggatgccttcgaacatgttgctaagtggaattctgatgaagaaagaattgaagcttggttgagagctagaactgctcaacatgttagagttgctgcattggatttggaagttgattttgccgctggtgaagaaatgttaactgctgtttcttgtaagttcaggccagaaaacgttgttgctgaattggctgaagctggtttaagacaaactcattggtggactgatcctgctggtgattttggtttgtctttggctgttagataa

SEQ ID NO: 134 - protein, 321 aa, Mycobacterium smegmatis
MTLSLANYLAADSAAEALRRDVRAGLTAAPKSLPPKWFYDAVGSDLFDQITRLPEYYPTRTEAQILRTRSAEIIAAAGADTLVELGSGTSEKTRMLLDAMRDAELLRRFIPFDVDAGVLRSAGAAIGAEYPGIEIDAVCGDFEEHLGKIPHVGRRLVVFLGSTIGNLTPAPRAEFLSTLADTLQPGDSLLLGTDLVKDTGRLVRAYDDAAGVTAAFNRNVLAVVNRELSADFDLDAFEHVAKWNSDEERIEAWLRARTAQHVRVAALDLEVDFAAGEEMLTAVSCKFRPENVVAELAEAGLRQTHWWTDPAGDFGLSLAVR

SEQ ID NO: 135 - DNA, 1245 bp, Citrus sinensis
atgggctctaagaagcgtagaagaagaagagaagaaagaccaaccattcatcccaagaacaagtactctgaaaatccaccagatttcgctttgttggcttcattatacccatcttttgagcccttcgttttctactctagagatggtagaccaagaattgattggactgatttcaacgctactagagaattgaccagagttttgttgttgcatgatcacggtttgaattggtggattccagatggtcaattgtgtccaactgttccaaataggtccaactacattcattggatcgaggacttgttgtcctccaacattattccaactacttctagaaacggtgacaaggttaagggtttcgatattggtactggtgctaactgtatctatcctttgttgggtgcttctttgttaggttggtcatttgttggttctgatatgaccgatgttgctttggaatgggctgaaaagaatgttaagtctaacccacacatctccgaattgatcgaaatcagaaaggttgacaactctgaatctaccccatccattcaagaatctttgactggtaagtccgttcaggatgaatctaacatggatatgtctggtcacatggatgaagaagctgaaccatcttcatcctcttcattcaatttgccagctggtgctcaatcttcttatcatggtccaccagttttggttggtgttgtaagagatggtgaacaattcgatttctgtatctgtaacccaccattcttcgaatctatggaagaagcaggtttgaacccaaaaacttcttgtggtggtactccagaagaaatggtttgttctggtggtgaaagagctttcattaccagaatcattgaagattccgttgccttgaagcaaactttcagatggtatacttctatggtcggtaggaagtctaacttgaagttcttgatctccaagttgagaaaggtcggtgttactatcgttaagactaccgaatttgtccaaggtcaaacttgtagatggggtttagcatggtcttttgttccaccagctagaaagattatctctccacatgttgccgagaaaaagaacttgtcttttatgttggaaggtgtccagagacaattctctgctttggatgttctgcaatccatcgaaactttcttttctgcttctggtgcctcttgtaagttgaatgcttcttctttcaccgtcaacgttagattccattgctggatttctcatggtgtctga

SEQ ID NO: 136 - protein, 414 aa, Citrus sinensis
MGSKKRRRRREERPTIHPKNKYSENPPDFALLASLYPSFEPFVFYSRDGRPRIDWTDFNATRELTRVLLLHDHGLNWWIPDGQLCPTVPNRSNYIHWIEDLLSSNIIPTTSRNGDKVKGFDIGTGANCIYPLLGASLLGWSFVGSDMTDVALEWAEKNVKSNPHISELIEIRKVDNSESTPSIQESLTGKSVQDESNMDMSGHMDEEAEPSSSSSFNLPAGAQSSYHGPPVLVGVVRDGEQFDFCICNPPFFESMEEAGLNPKTSCGGTPEEMVCSGGERAFITRIIEDSVALKQTFRWYTSMVGRKSNLKFLISKLRKVGVTIVKTTEFVQGQTCRWGLAWSFVPPARKIISPHVAEKKNLSFMLEGVQRQFSALDVLQSIETFFSASGASCKLNASSFTVNVRFHCWISHGV

SEQ ID NO: 137 - DNA, 1152 bp, Citrus sinensis
atggcttcattatacccatcttttgagcccttcgttttctactctagagatggtagaccaagaattgattggactgatttcaacgctactagagaattgaccagagttttgttgttgcatgatcacggtttgaattggtggattccagatggtcaattgtgtccaactgttccaaataggtccaactacattcattggatcgaggacttgttgtcctccaacattattccaactacttctagaaacggtgacaaggttaagggtttcgatattggtactggtgctaactgtatctatcctttgttgggtgcttctttgttaggttggtcatttgttggttctgatatgaccgatgttgctttggaatgggctgaaaagaatgttaagtctaacccacacatctccgaattgatcgaaatcagaaaggttgacaactctgaatctaccccatccattcaagaatctttgactggtaagtccgttcaggatgaatctaacatggatatgtctggtcacatggatgaagaagctgaaccatcttcatcctcttcattcaatttgccagctggtgctcaatcttcttatcatggtccaccagttttggttggtgttgtaagagatggtgaacaattcgatttctgtatctgtaacccaccattcttcgaatctatggaagaagcaggtttgaacccaaaaacttcttgtggtggtactccagaagaaatggtttgttctggtggtgaaagagctttcattaccagaatcattgaagattccgttgccttgaagcaaactttcagatggtatacttctatggtcggtaggaagtctaacttgaagttcttgatctccaagttgagaaaggtcggtgttactatcgttaagactaccgaatttgtccaaggtcaaacttgtagatggggtttagcatggtcttttgttccaccagctagaaagattatctctccacatgttgccgagaaaaagaacttgtcttttatgttggaaggtgtccagagacaattctctgctttggatgttctgcaatccatcgaaactttcttttctgcttctggtgcctcttgtaagttgaatgcttcttctttcaccgtcaacgttagattccattgctggatttctcatggtgtctga

SEQ ID NO: 138 - protein, 383 aa, Citrus sinensis
MASLYPSFEPFVFYSRDGRPRIDWTDFNATRELTRVLLLHDHGLNWWIPDGQLCPTVPNRSNYIHWIEDLLSSNIIPTTSRNGDKVKGFDIGTGANCIYPLLGASLLGWSFVGSDMTDVALEWAEKNVKSNPHISELIEIRKVDNSESTPSIQESLTGKSVQDESNMDMSGHMDEEAEPSSSSSFNLPAGAQSSYHGPPVLVGVVRDGEQFDFCICNPPFFESMEEAGLNPKTSCGGTPEEMVCSGGERAFITRIIEDSVALKQTFRWYTSMVGRKSNLKFLISKLRKVGVTIVKTTEFVQGQTCRWGLAWSFVPPARKIISPHVAEKKNLSFMLEGVQRQFSALDVLQSIETFFSASGASCKLNASSFTVNVRFHCWISHGV

SEQ ID NO: 139 - DNA, 1800 bp, Streptomyces laurentii
atgttgagaaagggtactgttgccttgatcaacccaaatcaaattcatccaccaattgctccatacgccttggatgttttgactactgctttggaagcttctggttttgaagctcatgttttggatttgaccttccacttggatgattggagacaaactttgagagattacttcagagctgaaagacctttgttggttggtgttacttgtagaaacactgataccgtttacgctttggaacaaagaccattcgttgatggttacaaggccgttattgatgaagttagaagattgactgctgctccagttgttgctggtggtgttggtttttctactatgccatttgctttggttgactacttcggtattgaatacggtgtaaaaggtccaggtgaaaagattatttgcgatttggctagagctttggctgaaggtagatctgctgatagaattcatattccaggtctgttggttaatagaggtcctggtaatgttactagagttgctccaccagctttagatccaagagcagctccagctccatcttcttctccatcaccttcgccagcaccatcatcttcatctgcaccagttccagttccattgtcttttgctgctgttggtcatcatgaatctagagcttggcaagctgaaactgaattgccatacactagaagatctggtgaaccatacaaggttgataacttgaggtattacagagaaggtggtttgggttctattttgactaagaacggttgtgtctacaagtgctctttttgtgttgaaccagatgctaagggtactcaatttgctagaagaggtataactgctgttgtcgacgaaatggaagctttgactgctcaaggtattcatgacttgcatacaaccgattccgaattcaacttgtccattgctcattccaagaacttgttgagagaaatcgttagaagaagagatcacgacgctacttctccattaagagatttgagattgtgggtttactgtcagccatctccatttgatgaagaatttgctgaattattggctgctgctggttgtgctggtgttaatattggtgctgatcatacaagaccagaaatgttggatggttggaaagttactgctaaaggtactaggtactacgatttcgctgataccgaaagattggttcaattgtgtcataggaacggtatgttgactatggttgaagctttgtttggtatgcctggtgaaactttggaaaccatgagagattgtgttgacaggatgatggaattggatgctactgttactggtttctcattgggtttgagactgttaccttatatgggtttagctaagtccttggccgaacaatgtgatggtgttagaactgttagaggcttgcaatctaacaatgcttctggtccaatcgtcttgaaacaattgcatcaatgtgacggtcctatcgaatacgaaagacaattcatgttcgatgagtccggtgatttcagattggtttgttatttctcaccagacttgccagaagctccaggtactgctgattctccagatggtatttggagagcttcagttgattttttgtgggacagaatcccaaagtctgaacagtatagagttatgttgccaaccttgtcaggttcctctgaaaatgataacaactacgctgataaccccttcttgacttctttgaatagaaagggttacactggtgctttttgggctcattggagagatagagaagctattatgtctggtgctactttgccattgggtgaattagctgaagctgttagatga

SEQ ID NO: 140 - protein, 599 aa, Streptomyces laurentii
MLRKGTVALINPNQIHPPIAPYALDVLTTALEASGFEAHVLDLTFHLDDWRQTLRDYFRAERPLLVGVTCRNTDTVYALEQRPFVDGYKAVIDEVRRLTAAPVVAGGVGFSTMPFALVDYFGIEYGVKGPGEKIICDLARALAEGRSADRIHIPGLLVNRGPGNVTRVAPPALDPRAAPAPSSSPSPSPAPSSSSAPVPVPLSFAAVGHHESRAWQAETELPYTRRSGEPYKVDNLRYYREGGLGSILTKNGCVYKCSFCVEPDAKGTQFARRGITAVVDEMEALTAQGIHDLHTTDSEFNLSIAHSKNLLREIVRRRDHDATSPLRDLRLWVYCQPSPFDEEFAELLAAAGCAGVNIGADHTRPEMLDGWKVTAKGTRYYDFADTERLVQLCHRNGMLTMVEALFGMPGETLETMRDCVDRMMELDATVTGFSLGLRLLPYMGLAKSLAEQCDGVRTVRGLQSNNASGPIVLKQLHQCDGPIEYERQFMFDESGDFRLVCYFSPDLPEAPGTADSPDGIWRASVDFLWDRIPKSEQYRVMLPTLSGSSENDNNYADNPFLTSLNRKGYTGAFWAHWRDREAIMSGATLPLGELAEAVR

SEQ ID NO: 141 - DNA, 624 bp, Bos Taurus
atgagcaccccgagcattcattgtctgaaaccgagtccgctgcatctgccgagcggtattccgggtagtccgggtcgtcagcgtcgccataccctgcctgcaaatgaatttcgttgtctgacaccggaagatgcagccggtgtttttgaaattgaacgtgaagcatttattagcgtgagcggtaattgtccgctgaacctggatgaagttcgtcattttctgaccctgtgtccggaactgagcctgggttggtttgttgaaggtcgtctggttgcatttatcattggtagcctgtgggatgaagaacgtctgacccaagaaagcctgaccctgcatcgtccgggtggtcgtaccgcacatctgcatgcactggcagttcatcattcatttcgtcagcagggcaaaggtagcgttctgctgtggcgttatctgcaacatgccggtggtcagcctgccgttcgtcgtgcagttctgatgtgtgaagatgcactggttccgttttatcagcgttttggttttcatccggcaggtccgtgtgcagttgttgtgggtagcctgacctttaccgaaatgcattgtagcctgcgtggtcatgcagcactgcgtcgtaatagcgatcgttaa

SEQ ID NO: 142 - protein, 207 aa, Bos Taurus
MSTPSIHCLKPSPLHLPSGIPGSPGRQRRHTLPANEFRCLTPEDAAGVFEIEREAFISVSGNCPLNLDEVRHFLTLCPELSLGWFVEGRLVAFIIGSLWDEERLTQESLTLHRPGGRTAHLHALAVHHSFRQQGKGSVLLWRYLQHAGGQPAVRRAVLMCEDALVPFYQRFGFHPAGPCAVVVGSLTFTEMHCSLRGHAALRRNSDR

SEQ ID NO: 143 - DNA, 1056 bp, Ophiorrhiza pumila
atgcattcctctgaagctatggttgtttctattttgtgcgccttgttcctgtcatctttgtctttggtttcttcctctcctgaattcttcgaattcattgaagctccatcttacggtccaaatgcttacgcttttgattccgatggtgaattatacgcctctgttgaagatggtagaatcatcaaatacgacaagccctctaacaagttcttgactcatgctgttgcttctccaatttggaacaatgctttgtgtgagaacaacaccaatcaagacttgaaaccattgtgcggtagagtttacgatttcggttttcattacgaaacccagaggttgtatattgccgattgctattttggtttgggttttgttggtccagatggtggtcatgctattcaattggctacttctggtgatggtgttgagtttaaatggttgtacgctttggccattgatcaacaagctggttttgtttacgttaccgatgtttctaccaagtacgatgatagaggtgttcaagacatcatcagaatcaatgataccaccggtagattgattaagtacgatccatctactgaagaggttaccgttttgatgaagggtttgaatattccaggtggtactgaagtttctaaggatggttcttttgttttggttggtgaattcgcctctcacagaattttgaaatactggttgaaaggtccaaaggccaacacctctgaatttttgttgaaagttagaggtccaggcaacattaagagaacaaaggatggtgatttttgggttgcctcttctgataacaacggtattactgttactccaagaggtatcagatttgacgaattcggtaacatcttggaagttgttgctattccattgccatacaagggtgaacatatcgaacaagttcaagaacatgatggtgctttgttcgttggttctttgttccatgaatttgtcggtatcctgcacaactacaagtcatctgttgatcatcaccaagagaagaattctggtggtttgaacgcttccttcaaagagttctcttctttctaa

SEQ ID NO: 144 - protein, 351 aa, Ophiorrhiza pumila
MHSSEAMVVSILCALFLSSLSLVSSSPEFFEFIEAPSYGPNAYAFDSDGELYASVEDGRIIKYDKPSNKFLTHAVASPIWNNALCENNTNQDLKPLCGRVYDFGFHYETQRLYIADCYFGLGFVGPDGGHAIQLATSGDGVEFKWLYALAIDQQAGFVYVTDVSTKYDDRGVQDIIRINDTTGRLIKYDPSTEEVTVLMKGLNIPGGTEVSKDGSFVLVGEFASHRILKYWLKGPKANTSEFLLKVRGPGNIKRTKDGDFWVASSDNNGITVTPRGIRFDEFGNILEVVAIPLPYKGEHIEQVQEHDGALFVGSLFHEFVGILHNYKSSVDHHQEKNSGGLNASFKEFSSF

SEQ ID NO: 145 - DNA, 1035 bp, Rauvolfia serpentina
atggccaagttgtctgattctcaaactatggctttgttcaccgtgttcttgttgttcttgagttcctctttggctttgtcctctccaatcttgaaagaaattttgatcgaagctccaagctacgctccaaattcttttacttttgactctaccaacaagggcttctacacttctgttcaagatggtagagttatcaagtacgaaggtccaaactctggttttgttgattttgcttatgcttccccatactggaacaaggctttttgtgaaaattctaccgacgccgaaaaaagaccattgtgtggtagaacttacgacatctcttacaacttgcaaaacaaccagttgtacatcgttgattgctactaccacttgtctgttgttggttctgaaggtggtcatgctactcaattggctacttctgttgatggtgttccattcaaatggttgtacgctgttactgttgatcaaagaactggtatcgtttacttcaccgatgtttctaccttgtacgatgatagaggtgtccaacaaattatggatacctctgataagaccggtcgtttgattaagtatgacccatctaccaaagaaaccaccttgctgttgaaagaattgcatgctccaggtggtgctgaagtttctgctgattcttcttttgttttggtcgccgaattcttgtcccatcaaattgtcaaatattggttggagggtccaaaaaagggtactgcagaagttttggttaagatcccaaatccaggtaacattaagagaaacgctgatggtcatttctgggtttcttcatctgaagaattggatggtaacatgcacggtagagttgatccaaagggtattaagtttgacgagttcggtaacatcttggaagttattccattgccaccaccatttgctggtgaacattttgaacaaatccaagagcatgacggcttgttgtatattggtactttgttccatggttccgttggtattttggtttacgataagaagggcaactccttcgtttcttctcattga

SEQ ID NO: 146 - protein, 344 aa, Rauvolfia serpentina
MAKLSDSQTMALFTVFLLFLSSSLALSSPILKEILIEAPSYAPNSFTFDSTNKGFYTSVQDGRVIKYEGPNSGFVDFAYASPYWNKAFCENSTDAEKRPLCGRTYDISYNLQNNQLYIVDCYYHLSVVGSEGGHATQLATSVDGVPFKWLYAVTVDQRTGIVYFTDVSTLYDDRGVQQIMDTSDKTGRLIKYDPSTKETTLLLKELHAPGGAEVSADSSFVLVAEFLSHQIVKYWLEGPKKGTAEVLVKIPNPGNIKRNADGHFWVSSSEELDGNMHGRVDPKGIKFDEFGNILEVIPLPPPFAGEHFEQIQEHDGLLYIGTLFHGSVGILVYDKKGNSFVSSH

SEQ ID NO: 147 - DNA, 1059 bp, Catharanthus roseus
atggccaacttctctgaatccaaatctatgatggctgtgttctttatgttcttcctgctgttgttgtcctcctcttcttcatcatcttcatcctctccaatcctgaagaagattttcatcgaatctccatcttacgctccaaacgcttttacttttgattctaccgataagggcttctacacctctgttcaagatggtagagttatcaaatacgagggtccaaattctggtttcactgattttgcttacgcttctccattttggaacaaggctttttgtgaaaactctacggacccagaaaaaagaccattgtgtggtagaacctacgatatctcttacgactacaagaactcccaaatgtacatcgttgatggtcattaccatttgtgcgttgttggtaaagaaggtggttacgctactcaattggctacttcagttcaaggtgttccattcaaatggttgtacgctgttactgttgatcaaagaactggtatcgtttacttcaccgatgtttcttccatccatgatgattctccagaaggtgtcgaagaaattatgaacacttctgatagaaccggcaggttgatgaagtatgatccatctacaaaagaaaccaccttgctgttgaaagaattgcatgttccaggtggtgctgaaatttctgctgatggttcttttgttgttgtggccgaatttttgtccaacagaattgtcaaatactggttggaaggtccaaaaaagggttctgctgaattcttggttaccattccaaatccaggtaacatcaagagaaattccgatggtcacttttgggtttccagttctgaagaattggatggtggtcaacacggtagagttgtttctagaggtattaagtttgacggtttcggtaacatcttgcaagttattccattgccaccaccatatgaaggtgaacatttcgaacaaatccaagaacacgatggcttgttgtacattggttccttgtttcattcctccgttggtatcttggtttacgatgatcatgataacaagggcaactcctacgtttcttcttga

SEQ ID NO: 148 - protein, 352 aa, Catharanthus roseus
MANFSESKSMMAVFFMFFLLLLSSSSSSSSSSPILKKIFIESPSYAPNAFTFDSTDKGFYTSVQDGRVIKYEGPNSGFTDFAYASPFWNKAFCENSTDPEKRPLCGRTYDISYDYKNSQMYIVDGHYHLCVVGKEGGYATQLATSVQGVPFKWLYAVTVDQRTGIVYFTDVSSIHDDSPEGVEEIMNTSDRTGRLMKYDPSTKETTLLLKELHVPGGAEISADGSFVVVAEFLSNRIVKYWLEGPKKGSAEFLVTIPNPGNIKRNSDGHFWVSSSEELDGGQHGRVVSRGIKFDGFGNILQVIPLPPPYEGEHFEQIQEHDGLLYIGSLFHSSVGILVYDDHDNKGNSYVSS

SEQ ID NO: 149 - DNA, 1059 bp, Catharanthus roseus
atggccaacttctctgaatccaaatctatgatggctgtgttctttatgttcttcctgctgttgttgtcctcctcttcttcatcatcttcatcctctccaatcctgaagaagattttcatcgaatctccatcttacgctccaaacgcttttacttttgattctaccgataagggcttctacacctctgttcaagatggtagagttatcaaatacgagggtccaaattctggtttcactgattttgcttacgcttctccattttggaacaaggctttttgtgaaaactctacggacccagaaaaaagaccattgtgtggtagaacctacgatatctcttacgactacaagaactcccaaatgtacatcgttgatggtcattaccatttgtgcgttgttggtaaagaaggtggttacgctactcaattggctacttcagttcaaggtgttccattcaaatggttgtacgctgttactgttgatcaaagaactggtatcgtttacttcaccgatgtttcttccatccatgatgcgtctccagaaggtgtcgaagaaattatgaacacttctgatagaaccggcaggttgatgaagtatgatccatctacaaaagaaaccaccttgctgttgaaagaattgcatgttccaggtggtgctgaaatttctgctgatggttcttttgttgttgtggccgaatttttgtccaacagaattgtcaaatactggttggaaggtccaaaaaagggttctgctgaattcttggttaccattccaaatccaggtaacatcaagagaaattccgatggtcacttttgggtttccagttctgaagaattggatggtggtcaacacggtagagttgtttctagaggtattaagtttgacggtttcggtaacatcttgcaagttattccattgccaccaccatatgaaggtgaacatttcgaacaaatccaagaacacgatggcttgttgtacattggttccttgtttcattcctccgttggtatcttggtttacgatgatcatgataacaagggcaactcctacgtttcttcttga

SEQ ID NO: 150 - protein, 352 aa, Catharanthus roseus
MANFSESKSMMAVFFMFFLLLLSSSSSSSSSSPILKKIFIESPSYAPNAFTFDSTDKGFYTSVQDGRVIKYEGPNSGFTDFAYASPFWNKAFCENSTDPEKRPLCGRTYDISYDYKNSQMYIVDGHYHLCVVGKEGGYATQLATSVQGVPFKWLYAVTVDQRTGIVYFTDVSSIHDASPEGVEEIMNTSDRTGRLMKYDPSTKETTLLLKELHVPGGAEISADGSFVVVAEFLSNRIVKYWLEGPKKGSAEFLVTIPNPGNIKRNSDGHFWVSSSEELDGGQHGRVVSRGIKFDGFGNILQVIPLPPPYEGEHFEQIQEHDGLLYIGSLFHSSVGILVYDDHDNKGNSYVSS

SEQ ID NO: 151 - DNA, 939 bp, Marinactinospora thermotolerans
atgaggcagattgaaatcgaatgggttcaaccaggtattactgttactgctgatttgtcttgggaaagaaatccagaattggccgaattattgtggactggtttgttgccatacaactcattgcaaaaccatgctttggtttctggtaaccacttgtaccatttgattgctgatccaagattggtttacaccgaagccagatacaaagaagatagaactaagtctccagatggcaccgtttttttgtctcaattgcaacatttggccgttaagtatggtccattgactgaatatttgccagctgctccagttggttctgttgttcctgaagatattgatgctttgagagaagctggtagagcttgttggaaagctgcttgggaaacaaaacaacctatcgaagttagggttagaagaaagggtgaagctgttactgattttgctttgccaagaactccaccagttgatcatccaggtgttcaaaaattggtcgaagaaattcaagacgaaaccgaaagagtttggattacaccaccagctgaaatcgttgatatgcatcaaggtagaattgcttctagagctggttcttacgatcaatacttctctaccttggttttcttgaacggtgaagttagaccattgggttactgtgctttgaacggtttgttgaagatctgtagaactaccgatttgaccttgaacgacttgaagagaattactccaaccttcattaagaccccagctgaatttttgggttacactggtttggatactttgtggcgttttacccaacaagtcttgactttgttaccagatgttgaaaccagagaacaatacttcgctttggttaatgccttgtacgctaacatgttgaacacttggaacttgcattttttcccatggcaacatggtactgactacagatatttggatgcctga

SEQ ID NO: 152 - protein, 312 aa, Marinactinospora thermotolerans
MRQIEIEWVQPGITVTADLSWERNPELAELLWTGLLPYNSLQNHALVSGNHLYHLIADPRLVYTEARYKEDRTKSPDGTVFLSQLQHLAVKYGPLTEYLPAAPVGSVVPEDIDALREAGRACWKAAWETKQPIEVRVRRKGEAVTDFALPRTPPVDHPGVQKLVEEIQDETERVWITPPAEIVDMHQGRIASRAGSYDQYFSTLVFLNGEVRPLGYCALNGLLKICRTTDLTLNDLKRITPTFIKTPAEFLGYTGLDTLWRFTQQVLTLLPDVETREQYFALVNALYANMLNTWNLHFFPWQHGTDYRYLDA

SEQ ID NO: 153 - DNA, 939 bp, Marinactinospora thermotolerans
atgaggcagattgaaatcgaatgggttcaaccaggtattactgttactgctgatttgtcttgggaaagaaatccagaattggccgaattattgtggactggtttgttgccatacaactcattgcaaaaccatgctttggtttctggtaaccacttgtaccatttgattgctgatccaagattggtttacaccgaagccagatacaaagaagatgctacaaaatctccagatggcaccgtttttttgtctcaattgcaagctttggctgttaagtatggtccattgactgaatatttgccagctgctccagttggttctgttgttcctgaagatattgatgctttgagagaagctggtagagcttgttggaaagctgcttgggaaacaaaacaacctatcgaagttagggttagaagaaagggtgaagctgttactgattttgctttgccaagaactccaccagttgatcatccaggtgttcaaaaattggtcgaagaaattcaagacgaaaccgaaagagtttggattacaccaccagctgaaatcgttgatatgcatcaaggtagaattgcttctagagctggttcttacgatcaatacttctctaccttggttttcttgaacggtgaagttagaccattgggttactgtgctttgaacggtttgttgaagatctgtagaactaccgatttgaccttgaacgacttgaagagaattactccaaccttcattaagaccccagctgaatttttgggttacactggtttggatactttgtggcgttttacccaacaagtcttgactttgttaccagatgttgaaaccagagaacaatacttcgctttggttaatgccttgtacgctaacatgttgaacacttggaacttgcattttttcccatggcaacatggtactgactacagatatttggatgcctga

SEQ ID NO: 154 - protein, 312 aa, Marinactinospora thermotolerans
MRQIEIEWVQPGITVTADLSWERNPELAELLWTGLLPYNSLQNHALVSGNHLYHLIADPRLVYTEARYKEDATKSPDGTVFLSQLQALAVKYGPLTEYLPAAPVGSVVPEDIDALREAGRACWKAAWETKQPIEVRVRRKGEAVTDFALPRTPPVDHPGVQKLVEEIQDETERVWITPPAEIVDMHQGRIASRAGSYDQYFSTLVFLNGEVRPLGYCALNGLLKICRTTDLTLNDLKRITPTFIKTPAEFLGYTGLDTLWRFTQQVLTLLPDVETREQYFALVNALYANMLNTWNLHFFPWQHGTDYRYLDA

SEQ ID NO: 155 - DNA, 1089 bp, Psilocybe cubensis
atggctttcgacttgaagactgaagacggtttgatcacttacttgactaagcacttgtctttggacgttgacacttctggtgttaagagattgtctggtggtttcgttaacgttacttggagaatcaagttgaacgctccataccaaggtcacacttctatcatcttgaagcacgctcaaccacacatgtctactgacgaagacttcaagatcggtgttgaaagatctgtttacgaataccaagctatcaagttgatgatggctaacagagaagttttgggtggtgttgacggtatcgtttctgttccagaaggtttgaactacgacttggaaaacaacgctttgatcatgcaagacgttggtaagatgaagactttgttggactacgttactgctaagccaccattggctactgacatcgctagattggttggtactgaaatcggtggtttcgttgctagattgcacaacatcggtagagaaagaagagacgacccagaattcaagttcttctctggtaacatcgttggtagaactacttctgaccaattgtaccaaactatcatcccaaacgctgctaagtacggtgttgacgacccattgttgccaactgttgttaaggacttggttgacgacgttatgcactctgaagaaactttggttatggctgacttgtggtctggtaacatcttgttgcaattggaagaaggtaacccatctaagttgcaaaagatctacatcttggactgggaattgtgtaagtacggtccagcttctttggacttgggttacttcttgggtgactgttacttgatctctagattccaagacgaacaagttggtactactatgagacaagcttacttgcaatcttacgctagaacttctaagcactctatcaactacgctaaggttactgctggtatcgctgctcacatcgttatgtggactgacttcatgcaatggggttctgaagaagaaagaatcaacttcgttaagaagggtgttgctgctttccacgacgctagaggtaacaacgacaacggtgaaatcacttctactttgttgaaggaatcttctactgcttaa

SEQ ID NO: 156 - protein, 362 aa, Psilocybe cubensis
MAFDLKTEDGLITYLTKHLSLDVDTSGVKRLSGGFVNVTWRIKLNAPYQGHTSIILKHAQPHMSTDEDFKIGVERSVYEYQAIKLMMANREVLGGVDGIVSVPEGLNYDLENNALIMQDVGKMKTLLDYVTAKPPLATDIARLVGTEIGGFVARLHNIGRERRDDPEFKFFSGNIVGRTTSDQLYQTIIPNAAKYGVDDPLLPTVVKDLVDDVMHSEETLVMADLWSGNILLQLEEGNPSKLQKIYILDWELCKYGPASLDLGYFLGDCYLISRFQDEQVGTTMRQAYLQSYARTSKHSINYAKVTAGIAAHIVMWTDFMQWGSEEERINFVKKGVAAFHDARGNNDNGEITSTLLKESSTA

SEQ ID NO: 157 - DNA, 1086 bp, Psilocybe serbica
atgaccttcgacttgaaaaccgaagaaggtttgttgtcctacttgactaagcacttgtctttggatgttgctccaaatggtgttaagagattgtctggtggtttcgttaatgttacttggagagttggtttgaacgctccatatcatggtcatacctccattattttgaaacatgcccaaccacacttgtcctccgatattgattttaagatcggtgttgaaaggtccgcctatgaatatcaagctttgaaaatcgtttccgccaactcttctttgttgggttcttctgatattagagtctctgtccctgaaggtttacactacgatgttgtaaacaacgccttgatcatgcaagatgttggtactatgaagaccttgttggattacgttactgctaagccaccaatttctgctgaaatagcttctttggtcggttctcaaattggtgcttttattgccagattgcacaatttgggtagagaaaacaaggataaggacgacttcaagttcttctctggtaatatcgttggtagaactactgctgatcagttgtaccaaaccattattccaaatgctgccaagtacggtattgatgatccaattttgccaatcgtcgtcaaagaattggttgaagaagtcatgaactccgaagagactttgattatggctgatttgtggtccggtaacatcttgttgcaatttgacgaaaactctaccgaattgaccagaatctggttggttgattgggaattgtgtaaatatggtccaccatctttggatatgggttactttttgggtgattgcttcttggttgctagattccaagatcaattggtcggtacttctatgagacaagcctacttgaaatcttacgccagaaatgtcaaagagccaatcaattacgctaaagctactgctggtattggtgctcatttggttatgtggactgattttatgaagtggggtaacgacgaagaaagagaagaattcgttaagaaaggtgttgaagctttccatgaagccaacgaagataatagaaacggtgaaatcacctccatcttggtgaaagaagcttccagaacttga

SEQ ID NO: 158 - protein, 361 aa, Psilocybe serbica
MTFDLKTEEGLLSYLTKHLSLDVAPNGVKRLSGGFVNVTWRVGLNAPYHGHTSIILKHAQPHLSSDIDFKIGVERSAYEYQALKIVSANSSLLGSSDIRVSVPEGLHYDVVNNALIMQDVGTMKTLLDYVTAKPPISAEIASLVGSQIGAFIARLHNLGRENKDKDDFKFFSGNIVGRTTADQLYQTIIPNAAKYGIDDPILPIVVKELVEEVMNSEETLIMADLWSGNILLQFDENSTELTRIWLVDWELCKYGPPSLDMGYFLGDCFLVARFQDQLVGTSMRQAYLKSYARNVKEPINYAKATAGIGAHLVMWTDFMKWGNDEEREEFVKKGVEAFHEANEDNRNGEITSILVKEASRT

SEQ ID NO: 159 - DNA, 1089 bp, Panaeolus cyanescens
atggccttcgatttgaaaaccgttgaaggtttgatcgtctacttgaccaaatgcttgtctttggaagttgattcctctggtgttaagagattgtctggtggttttgttaacgtcacttggagaattagattgaacgctccatatcaaggtcacacctccattattttgaaacatgctcaaccacatatgtccaccgataaggattttaagatcggtgttgaaaggtccgtctatgaataccaagctttgaaggttatttccgctaacagagaagctttaggtggtatcgattctagagtttctgctcctgaaggtttacattacgatgttgaaaacaacgccttgatcatgcaagatgtcggtactttgaaaacgctgatggattacgttattgaaaagccagctatctctaccgaaatggctagattgattggtactgaaatcggtgatttcgttgccagattgcattctattggtagacaaaagagagatcagccagacttcaagtttttctctggtaatatcgttggtagaactaccgctgatcaactgtaccaaactattttgccaaacactgccaagtacggtattgatgatccattattgccaaccgttgttaaggatttggttgatgaagctatgcagtctgaagagactttgattatggctgatttgtggaccggtaacatcttggttgaatttgaagaaggtaacctgtccgtcttgaaaaagatatggttggttgattgggagttgtgcaaatatggtccagttagattggatatgggttactttttgggtgactgcttcttgatctctaggttcaagaatgaacaagttgctaaggctatgagacaagctttcttgcaaagatacaacagagtctctgatacccctatcaattactctgttgctactactggtattgctgcccatatagttatgtggactgattttatgaactggggcactgaagaggaaagaaaagaatacgttaagaagggtgttgccggtattcatgatggtagaaatcataacgttgacggtgaaatcacctccatcttgatgcaagaagcttcaactgcttga

SEQ ID NO: 160 - protein, 362 aa, Panaeolus cyanescens
MAFDLKTVEGLIVYLTKCLSLEVDSSGVKRLSGGFVNVTWRIRLNAPYQGHTSIILKHAQPHMSTDKDFKIGVERSVYEYQALKVISANREALGGIDSRVSAPEGLHYDVENNALIMQDVGTLKTLMDYVIEKPAISTEMARLIGTEIGDFVARLHSIGRQKRDQPDFKFFSGNIVGRTTADQLYQTILPNTAKYGIDDPLLPTVVKDLVDEAMQSEETLIMADLWTGNILVEFEEGNLSVLKKIWLVDWELCKYGPVRLDMGYFLGDCFLISRFKNEQVAKAMRQAFLQRYNRVSDTPINYSVATTGIAAHIVMWTDFMNWGTEEERKEYVKKGVAGIHDGRNHNVDGEITSILMQEASTA

SEQ ID NO: 161 - DNA, 753 bp, Capsicumannuum
atggcttctgctccacaaccaccaactttgtctgaaaagactactaatttgtccccagaaaacgataacgttactatcactggtaagatctacaccagagttagattggctacaaagtctgacttgcatcatgcttaccagttgttctaccaaattcatgcctaccacaatcagttccatttgttcaaagctaccgagtcctctttgtccgatttgttcttcaaagaaaaccccttgcctttgttttacggtcctactttgttgttgttggaagtttctccaactgctttcactgaacctaagaacaacaaggatgaaggtttcaagccagttttcactgctttggatttgaagttcccagttgttgaaggtcaagtcgaagaattcagatccaaatacgatgatggtactgacaagagggatgtttttattgctggttacgcttacttcttcgcctcttattctttgttcggtaatgataagccaggcatccatttcgattccttgtactttagagagtcctacagaaagttaggtatgggcaagttgttgtttggtactgttgcttctattgctgctaacaatggttttgctgcagttgaaggtatagttgctgtttggaacaaaaagtcctacgacttctatgtttccatgggtgttgaaatgcacgatgattttagattcggtaagttggacggtgaaaacttgcaaaagtatgccgacaaagaaaagaatggtgctggttcttgttaa

SEQ ID NO: 162 - protein, 250 aa, Capsicumannuum
MASAPQPPTLSEKTTNLSPENDNVTITGKIYTRVRLATKSDLHHAYQLFYQIHAYHNQFHLFKATESSLSDLFFKENPLPLFYGPTLLLLEVSPTAFTEPKNNKDEGFKPVFTALDLKFPVVEGQVEEFRSKYDDGTDKRDVFIAGYAYFFASYSLFGNDKPGIHFDSLYFRESYRKLGMGKLLFGTVASIAANNGFAAVEGIVAVWNKKSYDFYVSMGVEMHDDFRFGKLDGENLQKYADKEKNGAGSC

SEQ ID NO: 163 - DNA, 1587 bp, Psilocybe cubensis
atgaacttcttgttgtccattgccactttaggtttgggtttacaagcttacgctgttatgattggtccatctgctactttggttatcggcaacaagaatattgctccagatggtattaagagatccgctgttttggctggtacttctttggatactttgtcttttccaggtccagttattagagctactaagggtgataccttgtccttgaacgttgttaatcaattgactgatgccaccatgttgatgggtacttctattcattggcatggtttccatcaaaagggtacatcttgggctgatggtgttgttggtgttactcaatgtccaattgctcctggtcattctttcttgtaccaatttccaactgctaatcaagctggcactttctggtatcattctcattactctacccaatactgtgacggtttgagaggtgctttgatagtttatgatccaaccgatccatacagaacctggtacgatattgatgatgaatccaccattattaccttggccgattggtatcataaggctgctccattgcaaactttgagaactgctaaagaagattccgtcttgattaacggtcaaggtagagttccaggtgataagactactgattctactccattgtccgtcattaacatcatcccacaaaagagatacaggttcaggttgatttccatttcttgtgatccagccttctccttctctattgatggtcattcaatgactgttatcgaagccgattctcaatctgttcaaccattgactgtcaacgaaattaccattttcgctggtcagagatactcctttatcttgtatgctaacaacccagttggtaactactggattagatctcaacctacttatccagatgatggtatccaaggttatgctggtggtattaactctgccattttgagatattctggtgctccagctgttaacccaactacaaaaaaagcctctatcaccattccattggttgaagctgacttgaggccattatattctccagctgctccaggtttgccatctccaggtgctgcagatgttaatatcaagttggatatctcctacaactccccttctgaaactttcttcgttaacaactctactttcccagaagttccagttcctgttttgttgcaaattttgtcaggtgctcaatccgctaatgatttgttgccagctggttctgtttacactttgccaccaaacaaggttatcgaaatttctatgccaggtggtagaccaggttcaccacatccaatgcacttgcatggtcatgatttttccgttgttagatctgctggttccaacagatacaattatgctaacccagttagaagggatgtcgttaacattggtatggaagatactgataacgtcaccatcagattcaagactgataattctggtccatggatcttgcattgccatattgattggcatattgaagctggtttggctgttgttttcaccgaagatattccatccatccaattttctaatccaccaccagcttgggatcaattgtgtccaatctttaatgctatcccaccacaaaagttccactaa

SEQ ID NO: 164 - protein, 528 aa, Psilocybe cubensis
MNFLLSIATLGLGLQAYAVMIGPSATLVIGNKNIAPDGIKRSAVLAGTSLDTLSFPGPVIRATKGDTLSLNVVNQLTDATMLMGTSIHWHGFHQKGTSWADGVVGVTQCPIAPGHSFLYQFPTANQAGTFWYHSHYSTQYCDGLRGALIVYDPTDPYRTWYDIDDESTIITLADWYHKAAPLQTLRTAKEDSVLINGQGRVPGDKTTDSTPLSVINIIPQKRYRFRLISISCDPAFSFSIDGHSMTVIEADSQSVQPLTVNEITIFAGQRYSFILYANNPVGNYWIRSQPTYPDDGIQGYAGGINSAILRYSGAPAVNPTTKKASITIPLVEADLRPLYSPAAPGLPSPGAADVNIKLDISYNSPSETFFVNNSTFPEVPVPVLLQILSGAQSANDLLPAGSVYTLPPNKVIEISMPGGRPGSPHPMHLHGHDFSVVRSAGSNRYNYANPVRRDVVNIGMEDTDNVTIRFKTDNSGPWILHCHIDWHIEAGLAVVFTEDIPSIQFSNPPPAWDQLCPIFNAIPPQKFH

SEQ ID NO: 165 - DNA, 1659 bp, Psilocybe cubensis
atgcactctttgggtttgttcgccttgatttctttgttgccatatttggttgttgcccaaagagcttctacttttgctggtgctactactactgctgtttttccaccaccaaatgctggtattgctgctactgatacaaatttcccagatggttctaaggttggttttccaggtccaactagaactggtgatgaagctgctgctattgaaactgctccagttgctgctaaagttgattcttttttcccattgattaacggtggtgctgaagattctactccaatggatccttttgatgttttggttcacttgggtaacttgtccccatttcaatctgttccatcttctgcttttggtttgcctggtgcttctccattgattccagaaggttgcgatatagttcaagcccatttgttgcatagacatggtgctagatatccaactgctgattctggtccaccaggttttgctgcaaaggttaatgctgctgcaaattctggttctggtttttcagctaaaggtgacttgtctttcttgaacacttggacctacaaattaggtggtgatattttgactccattcggcagatctcagttgttcaacttaggtgttggtttcagagttaagtacggtcagttgttgaagggttttaagaacttgccagttttcagaactacctccgaagctagaatgttggattctgctttacatttcgctactggttttttcggtgtccaaaagtaccaagattcctaccaccaattgatcaccattgaacatggtggtaagcaaaacaatactttggctccatacgaatcttgtaccaatggtttgaatgctgttgcagctttcggtgatattcaatctcaaaaatgggcccaaatctacttggctccagctgtaaaaagattgaacgctaacttgagaggcttgcaattgaacgttactgatttgtttgccatgcaacaattgtgtgctttcgaaactgttgctttgggttactcttctttctgtgatttgttcactgaagaggaatggcgtggttttgaataccaatctgacttgcaattctggtactcttttggtccaggtaatccagcttcttctgctatgggtattggttacgttcaagaattggtttccagattgaccaagactagaattactactttcgataccactgtcaacgcttctatcgttacttccgatatcttgtttccattggatcagccaatctacgttgatgctactcatgatacaattttgaccgctattttcgctgctatgaacttgactactttagctgctaatggtccattgccaactgatcatattccaaagggtcaaaccttcttcgctaatcaattagctccatttgccgccaatgttgttggtcaagttttgtcttgtccagcatcttctaagccaactcatattagatggatcatcaacgatggtgttgttccattgactggtattaagggttgtaagccagataagaatggtatgtgtgagatcaacactttcattgccggtatgaagcaaaggatgcaagaaattgatttcaacttcgattgcttcgccaactacactgttccagttccagataatatcgtcaatggtcaatacccacagaacttgaagccaaagaagaagtga

SEQ ID NO: 166 - protein, 552 aa, Psilocybe cubensis
MHSLGLFALISLLPYLVVAQRASTFAGATTTAVFPPPNAGIAATDTNFPDGSKVGFPGPTRTGDEAAAIETAPVAAKVDSFFPLINGGAEDSTPMDPFDVLVHLGNLSPFQSVPSSAFGLPGASPLIPEGCDIVQAHLLHRHGARYPTADSGPPGFAAKVNAAANSGSGFSAKGDLSFLNTWTYKLGGDILTPFGRSQLFNLGVGFRVKYGQLLKGFKNLPVFRTTSEARMLDSALHFATGFFGVQKYQDSYHQLITIEHGGKQNNTLAPYESCTNGLNAVAAFGDIQSQKWAQIYLAPAVKRLNANLRGLQLNVTDLFAMQQLCAFETVALGYSSFCDLFTEEEWRGFEYQSDLQFWYSFGPGNPASSAMGIGYVQELVSRLTKTRITTFDTTVNASIVTSDILFPLDQPIYVDATHDTILTAIFAAMNLTTLAANGPLPTDHIPKGQTFFANQLAPFAANVVGQVLSCPASSKPTHIRWIINDGVVPLTGIKGCKPDKNGMCEINTFIAGMKQRMQEIDFNFDCFANYTVPVPDNIVNGQYPQNLKPKKK

SEQ ID NO: 167 - DNA, 1569 bp, Chondromyces crocatus
atgcaattgccatcttctactaagatcttggttgttggtggtggtccagctggttctactgctgctactttgttggctagagaaggtttcgaagttactttggttgaaaaggctatcttcccaagataccacatcggtgaatctttgttgatctctgttcaaccaatcatcgacttgttgggtgctagagaagctgttgaagctcacggtttccaaagaaagaagggtgttttgtgggaatggggtggtgaaagatggttgttcgactggaagaagttgagatacgactacactttccacgttaagagagaagaattcgacgaaatcttgttgagaaacgctcaaaagaacggtgttaaggttttcgaaggtatcgacatctctagattggaattcgacggtgaaagaccagttgctgctaagtggtctaagtcttctactggtgaatctggtactatccaattcgaattcttgttggacgcttctggtagagctggtttgatggctactcaatacttgagatctagaatgttcatgaaggctttccaaaacgttgctacttggggttactggaagggtgctactatcccagaagttgaagttgaaggtccaatcactgttggttctatcccatacggttggatctggggtatcccattgagagaccaaactatgtctgttggtttggttatccaccaagaattgttcaaggaaaagagagctactcaatctgttgaagaaatctaccacgaaggtttgaaggcttctccattgttccaagacgttgttttgaagggtgctactttggaaccacaaatcagaactgaaactgactactcttacatctctagaactttggctggtccaggtttcttcttggttggtgactctggtgctttcatcgacccattgttgtcttctggtgttcacttggctatgcactctgctttgttggctgctgcttctgttaagtctatcatcgctggtgaagttgacatggcttctgctactgaattctaccaaagatgttaccaaggtcacttcttgagatgggctttgatcgttgcttctttctacgaagttaacgctagaaaggaaacttacttctggactgctcaacaattggctcacgaagaattgggtgttttcaacatgtctcaagctgacatgaaggacgttttcgctactatggtttctggtgttgttgacttgggtgacgctcaaaacgctggtagattgcaaaagggtgctgaaagagttcaccaatacttggacgacgacggtagagaagaagacgttactgctttgttgcaaaagtctaagcaaagaatcttcgaatacttggacagagttaagaacagagactctagagctgctatgcaaagatacaaggctggtggtactgaaactttctctatgggtttggacgctgacggtgctgttggtggtttgtacgttactactgaaccaagattgggtttgttgagaaaggttgttgaagaaagagctgaagctgctactgaagctccagctccagctgctccaccaccagctgttgctgaagtttaa

SEQ ID NO: 168 - protein, 522 aa, Chondromyces crocatus
MQLPSSTKILVVGGGPAGSTAATLLAREGFEVTLVEKAIFPRYHIGESLLISVQPIIDLLGAREAVEAHGFQRKKGVLWEWGGERWLFDWKKLRYDYTFHVKREEFDEILLRNAQKNGVKVFEGIDISRLEFDGERPVAAKWSKSSTGESGTIQFEFLLDASGRAGLMATQYLRSRMFMKAFQNVATWGYWKGATIPEVEVEGPITVGSIPYGWIWGIPLRDQTMSVGLVIHQELFKEKRATQSVEEIYHEGLKASPLFQDVVLKGATLEPQIRTETDYSYISRTLAGPGFFLVGDSGAFIDPLLSSGVHLAMHSALLAAASVKSIIAGEVDMASATEFYQRCYQGHFLRWALIVASFYEVNARKETYFWTAQQLAHEELGVFNMSQADMKDVFATMVSGVVDLGDAQNAGRLQKGAERVHQYLDDDGREEDVTALLQKSKQRIFEYLDRVKNRDSRAAMQRYKAGGTETFSMGLDADGAVGGLYVTTEPRLGLLRKVVEERAEAATEAPAPAAPPPAVAEV

SEQ ID NO: 169 - DNA, 1536 bp, Streptomyces rugosporus
atgatcagatctgttgttatcgttggtggtggtactgctggttggatgactgcttcttacttgaaggctgctttcgacgacagaatcgacgttactttggttgaatctggtaacgttagaagaatcggtgttggtgaagctactttctctactgttagacacttcttcgactacttgggtttggacgaaagagaatggttgccaagatgtgctggtggttacaagttgggtatcagattcgaaaactggtctgaaccaggtgaatacttctaccacccattcgaaagattgagagttgttgacggtttcaacatggctgaatggtggttggctgttggtgacagaagaacttctttctctgaagcttgttacttgactcacagattgtgtgaagctaagagagctccaagaatgttggacggttctttgttcgcttctcaagttgacgaatctttgggtagatctactttggctgaacaaagagctcaattcccatacgcttaccacttcgacgctgacgaagttgctagatacttgtctgaatacgctatcgctagaggtgttagacacgttgttgacgacgttcaacacgttggtcaagacgaaagaggttggatctctggtgttcacactaagcaacacggtgaaatctctggtgacttgttcgttgactgtactggtttcagaggtttgttgatcaaccaaactttgggtggtagattccaatctttctctgacgttttgccaaacaacagagctgttgctttgagagttccaagagaaaacgacgaagacatgagaccatacactactgctactgctatgtctgctggttggatgtggactatcccattgttcaagagagacggtaacggttacgtttactctgacgaattcatctctccagaagaagctgaaagagaattgagatctactgttgctccaggtagagacgacttggaagctaaccacatccaaatgagaatcggtagaaacgaaagaacttggatcaacaactgtgttgctgttggtttgtctgctgctttcgttgaaccattggaatctactggtatcttcttcatccaacacgctatcgaacaattggttaagcacttcccaggtgaaagatgggacccagttttgatctctgcttacaacgaaagaatggctcacatggttgacggtgttaaggaattcttggttttgcactacaagggtgctcaaagagaagacactccatactggaaggctgctaagactagagctatgccagacggtttggctagaaagttggaattgtctgcttctcacttgttggacgaacaaactatctacccatactaccacggtttcgaaacttactcttggatcactatgaacttgggtttgggtatcgttccagaaagaccaagaccagctttgttgcacatggacccagctccagctttggctgaattcgaaagattgagaagagaaggtgacgaattgatcgctgctttgccatcttgttacgaatacttggcttctatccaatag

SEQ ID NO: 170 - protein, 511 aa, Streptomyces rugosporus
MIRSVVIVGGGTAGWMTASYLKAAFDDRIDVTLVESGNVRRIGVGEATFSTVRHFFDYLGLDEREWLPRCAGGYKLGIRFENWSEPGEYFYHPFERLRVVDGFNMAEWWLAVGDRRTSFSEACYLTHRLCEAKRAPRMLDGSLFASQVDESLGRSTLAEQRAQFPYAYHFDADEVARYLSEYAIARGVRHVVDDVQHVGQDERGWISGVHTKQHGEISGDLFVDCTGFRGLLINQTLGGRFQSFSDVLPNNRAVALRVPRENDEDMRPYTTATAMSAGWMWTIPLFKRDGNGYVYSDEFISPEEAERELRSTVAPGRDDLEANHIQMRIGRNERTWINNCVAVGLSAAFVEPLESTGIFFIQHAIEQLVKHFPGERWDPVLISAYNERMAHMVDGVKEFLVLHYKGAQREDTPYWKAAKTRAMPDGLARKLELSASHLLDEQTIYPYYHGFETYSWITMNLGLGIVPERPRPALLHMDPAPALAEFERLRREGDELIAALPSCYEYLASIQ

SEQ ID NO: 171 - DNA, 1572 bp, Streptomyces toxytricini
atgaacactagaaacccagacaaggttgttatcgttggtggtggtactgctggttggatgactgcttcttacttgaagaaggctttcggtgaaagagtttctgttactttggttgaatctggtactatcggtactgttggtgttggtgaagctactttctctgacatcagacacttcttcgaattcttggacttgagagaagaagaatggatgccagcttgtaacgctacttacaagttggctgttagattccaagactggcaaagaccaggtcaccacttctaccacccattcgaacaaatgagatctgttgacggtttcccattgactgactggtggttgcaaaacggtccaactgacagattcgacagagactgtttcgttatggcttctttgtgtgacgctggtagatctccaagatacttgaacggttctttgttgcaacaagaattcgacgaaagagctgaagaaccagctggtttgactatgtctgaacaccaaggtaagactcaattcccatacgcttaccacttcgaagctgctttgttggctgaattcttgtctggttactctaaggacagaggtgttaagcacgttgttgacgaagttttggaagttaagttggacgacagaggttggatctctcacgttgttactaaggaacacggtgacatcggtggtgacttgttcgttgactgtactggtttcagaggtgttttgttgaaccaagctttgggtgttccattcgtttcttaccaagacactttgccaaacgactctgctgttgctttgcaagttccattggacatggaagctagaggtatcccaccatacactagagctactgctaaggaagctggttggatctggactatcccattgatcggtagaatcggtactggttacgtttacgctaaggactactgttctccagaagaagctgaaagaactttgagagaattcgttggtccagaagctgctgacgttgaagctaaccacatcagaatgagaatcggtagatctgaacaatcttggaagaacaactgtgttgctatcggtttgtcttctggtttcgttgaaccattggaatctactggtatcttcttcatccaccacgctatcgaacaattggttaagcacttcccagctggtgactggcacccacaattgagagctggttacaactctgctgttgctaacgttatggacggtgttagagaattcttggttttgcactacttgggtgctgctagaaacgacactagatactggaaggacactaagactagagctgttccagacgctttggctgaaagaatcgaaagatggaaggttcaattgccagactctgaaaacgttttcccatactaccacggtttgccaccatactcttacatggctatcttgttgggtactggtgctatcggtttgagaccatctccagctttggctttggctgacccagctgctgctgaaaaggaattcactgctatcagagacagagctagattcttggttgacactttgccatctcaatacgaatacttcgctgctatgggtcaaagagtttag

SEQ ID NO: 172 - protein, 523 aa, Streptomyces toxytricini
MNTRNPDKVVIVGGGTAGWMTASYLKKAFGERVSVTLVESGTIGTVGVGEATFSDIRHFFEFLDLREEEWMPACNATYKLAVRFQDWQRPGHHFYHPFEQMRSVDGFPLTDWWLQNGPTDRFDRDCFVMASLCDAGRSPRYLNGSLLQQEFDERAEEPAGLTMSEHQGKTQFPYAYHFEAALLAEFLSGYSKDRGVKHVVDEVLEVKLDDRGWISHVVTKEHGDIGGDLFVDCTGFRGVLLNQALGVPFVSYQDTLPNDSAVALQVPLDMEARGIPPYTRATAKEAGWIWTIPLIGRIGTGYVYAKDYCSPEEAERTLREFVGPEAADVEANHIRMRIGRSEQSWKNNCVAIGLSSGFVEPLESTGIFFIHHAIEQLVKHFPAGDWHPQLRAGYNSAVANVMDGVREFLVLHYLGAARNDTRYWKDTKTRAVPDALAERIERWKVQLPDSENVFPYYHGLPPYSYMAILLGTGAIGLRPSPALALADPAAAEKEFTAIRDRARFLVDTLPSQYEYFAAMGQRV

SEQ ID NO: 173 - DNA, 1593 bp, Lechevalieria aerocolonigenes
atgtctggtaagatcgacaagatcttgatcgttggtggtggtactgctggttggatggctgcttcttacttgggtaaggctttgcaaggtactgctgacatcactttgttgcaagctccagacatcccaactttgggtgttggtgaagctactatcccaaacttgcaaactgctttcttcgacttcttgggtatcccagaagacgaatggatgagagaatgtaacgcttcttacaaggttgctatcaagttcatcaactggagaactgctggtgaaggtacttctgaagctagagaattggacggtggtccagaccacttctaccactctttcggtttgttgaagtaccacgaacaaatcccattgtctcactactggttcgacagatcttacagaggtaagactgttgaaccattcgactacgcttgttacaaggaaccagttatcttggacgctaacagatctccaagaagattggacggttctaaggttactaactacgcttggcacttcgacgctcacttggttgctgacttcttgagaagattcgctactgaaaagttgggtgttagacacgttgaagacagagttgaacacgttcaaagagacgctaacggtaacatcgaatctgttagaactgctactggtagagttttcgacgctgacttgttcgttgactgttctggtttcagaggtttgttgatcaacaaggctatggaagaaccattcttggacatgtctgaccacttgttgaacgactctgctgttgctactcaagttccacacgacgacgacgctaacggtgttgaaccattcacttctgctatcgctatgaagtctggttggacttggaagatcccaatgttgggtagattcggtactggttacgtttactcttctagattcgctactgaagacgaagctgttagagaattctgtgaaatgtggcacttggacccagaaactcaaccattgaacagaatcagattcagagttggtagaaacagaagagcttgggttggtaactgtgtttctatcggtacttcttcttgtttcgttgaaccattggaatctactggtatctacttcgtttacgctgctttgtaccaattggttaagcacttcccagacaagtctttgaacccagttttgactgctagattcaacagagaaatcgaaactatgttcgacgacactagagacttcatccaagctcacttctacttctctccaagaactgacactccattctggagagctaacaaggaattgagattggctgacggtatgcaagaaaagatcgacatgtacagagctggtatggctatcaacgctccagcttctgacgacgctcaattgtactacggtaacttcgaagaagaattcagaaacttctggaacaactctaactactactgtgttttggctggtttgggtttggttccagacgctccatctccaagattggctcacatgccacaagctactgaatctgttgacgaagttttcggtgctgttaaggacagacaaagaaacttgttggaaactttgccatctttgcacgaattcttgagacaacaacacggtagatag

SEQ ID NO: 174 - protein, 530 aa, Lechevalieria aerocolonigenes
MSGKIDKILIVGGGTAGWMAASYLGKALQGTADITLLQAPDIPTLGVGEATIPNLQTAFFDFLGIPEDEWMRECNASYKVAIKFINWRTAGEGTSEARELDGGPDHFYHSFGLLKYHEQIPLSHYWFDRSYRGKTVEPFDYACYKEPVILDANRSPRRLDGSKVTNYAWHFDAHLVADFLRRFATEKLGVRHVEDRVEHVQRDANGNIESVRTATGRVFDADLFVDCSGFRGLLINKAMEEPFLDMSDHLLNDSAVATQVPHDDDANGVEPFTSAIAMKSGWTWKIPMLGRFGTGYVYSSRFATEDEAVREFCEMWHLDPETQPLNRIRFRVGRNRRAWVGNCVSIGTSSCFVEPLESTGIYFVYAALYQLVKHFPDKSLNPVLTARFNREIETMFDDTRDFIQAHFYFSPRTDTPFWRANKELRLADGMQEKIDMYRAGMAINAPASDDAQLYYGNFEEEFRNFWNNSNYYCVLAGLGLVPDAPSPRLAHMPQATESVDEVFGAVKDRQRNLLETLPSLHEFLRQQHGR

SEQ ID NO: 175 - DNA, 1431 bp, Escherichia coli
atgaaggactacgtcatggaaaactttaagcacttgccagaaccattcagaatcagagttattgaaccagttaagagaaccaccagagcttatagagaagaagccattattaagtccggtatgaacccattcttgttggattctgaagatgtgttcatcgatttgttgaccgattctggtactggtgctgttactcaatctatgcaagctgctatgatgagaggtgatgaagcttattctggttccagatcttattacgctttggccgaatctgttaagaacatttttggttaccagtacacgatcccaactcatcaaggtagaggtgctgaacaaatctacattccagttttgatcaagaagcgtgagcaagaaaaaggtttggacagatctaagatggttgccttctctaattacttcttcgataccactcaaggtcactctcaaatcaatggttgtactgttagaaacgtctacatcaaagaagctttcgatactggcgttagatacgattttaagggtaacttcgatttggaaggcttggaaagaggaattgaagaggttggtccaaacaacgttccatatatcgttgctactatcacctctaattctgctggtggtcaaccagtttctttggctaatttgaaagccatgtactccattgccaagaagtacgatattccagttgttatggattccgctagatttgctgaaaacgcctacttcattaagcaaagagaagctgagtacaaggattggaccattgaacaaattactagggaaacctacaagtacgctgatatgttggctatgtctgctaaaaaggatgctatggttccaatgggtggtttgttgtgtatgaaggatgattctttcttcgacgtttacaccgaatgtagaaccttgtgtgttgttcaagagggttttccaacttatggtggtttggaaggtggtgctatggaaagattggctgttggtctatatgatggtatgaacttggattggttggcttacagaattgcccaagttcaatatttggttgacggcttggaagaaattggtgttgtttgtcaacaagccggtggtcatgctgcttttgttgatgctggtaagttgttgccacatattccagctgatcaatttccagctcaagctttggcttgtgagttgtacaaagttgctggtattagagccgttgaaatcggttcatttttgttgggtagagatccaaagactggtaagcaattgccatgtccagctgaattattgagattgactattccaagagccacctacactcaaactcatatggatttcattatcgaggctttcaagcacgtcaaagaaaacgcttctaacattaagggtttgaccttcacttacgaacctaaggttttgagacatttcaccgccaagttgaaagaagtctga

SEQ ID NO: 176 - protein, 476 aa, Escherichia coli
MKDYVMENFKHLPEPFRIRVIEPVKRTTRAYREEAIIKSGMNPFLLDSEDVFIDLLTDSGTGAVTQSMQAAMMRGDEAYSGSRSYYALAESVKNIFGYQYTIPTHQGRGAEQIYIPVLIKKREQEKGLDRSKMVAFSNYFFDTTQGHSQINGCTVRNVYIKEAFDTGVRYDFKGNFDLEGLERGIEEVGPNNVPYIVATITSNSAGGQPVSLANLKAMYSIAKKYDIPVVMDSARFAENAYFIKQREAEYKDWTIEQITRETYKYADMLAMSAKKDAMVPMGGLLCMKDDSFFDVYTECRTLCVVQEGFPTYGGLEGGAMERLAVGLYDGMNLDWLAYRIAQVQYLVDGLEEIGVVCQQAGGHAAFVDAGKLLPHIPADQFPAQALACELYKVAGIRAVEIGSFLLGRDPKTGKQLPCPAELLRLTIPRATYTQTHMDFIIEAFKHVKENASNIKGLTFTYEPKVLRHFTAKLKEV

SEQ ID NO: 177 - DNA, 1218 bp, Streptomyces scabies
atgactgttccatctccattggctgacccatctatcgttccagacccatacccagtttacgctgacttggctcaaagaagaccagttcactgggttgaaagattgaacgcttgggctgttttgacttacgctgactgtgctgctggtttgaaggacccaagattgactgctgacagaggtactgaagttttggctgctaagttcccaggtcaaccattgccaccagacaacatcttccacagatggactaagaacgttgttatgtacactgacccaccattgcacgacgctttgagaagatctgttagagctggtttcactagagctgctcaccaacactacgaccaagttttgcaaaaggttgctcacgacttggttgcttctatcccagctggtgctactgaaatcgacgctgttccagctttggctgctgaattgccagttagatctgctgttcacgctttcggtgttccagaagaagacttgggtttcttgatcccaagagttaacactatcatgacttaccactctggtccaaaggaccaaccagttactcaagaaatcatcttggaaaagttgactgacttgcacacttacgcttctgaattgttgcaaggtatgagaggtaaggttttgccagacactgttatcgctagattggctgctgctcaagacggtttgactgaaactactccagaacaaactgttcaccaattggctttggttttcatcgctttgttcgctccaactactccaggttctttgtcttctggtactttggctttcgctagaaacccaagacaagttgaaagattcttggctgaccaagcttgtgttgacaacactgctaacgaagttttgagatacaacgcttctaaccaattcacttggagagttgctgctaaggacgttgaaatgggtggtgttagaatcgaagctggtcaaactttggctttgttcttgggttctgctaacagagacgctaacatgttcgaaagaccaaacgacttcgacttggacagaccaaactctgctagacacttgtctttcggtcaaggtgttcacgcttgtttggctgctcaattgatctctttgcaattgaagtggttctacgttgctttgttgaacagattcccaggtatcagaactgctggtgaaccaatctggaacgaaaacttggaattcagatctttgagatctttgccattgtctttgaga

SEQ ID NO: 178 - protein, 406 aa, Streptomyces scabies
MTVPSPLADPSIVPDPYPVYADLAQRRPVHWVERLNAWAVLTYADCAAGLKDPRLTADRGTEVLAAKFPGQPLPPDNIFHRWTKNVVMYTDPPLHDALRRSVRAGFTRAAHQHYDQVLQKVAHDLVASIPAGATEIDAVPALAAELPVRSAVHAFGVPEEDLGFLIPRVNTIMTYHSGPKDQPVTQEIILEKLTDLHTYASELLQGMRGKVLPDTVIARLAAAQDGLTETTPEQTVHQLALVFIALFAPTTPGSLSSGTLAFARNPRQVERFLADQACVDNTANEVLRYNASNQFTWRVAAKDVEMGGVRIEAGQTLALFLGSANRDANMFERPNDFDLDRPNSARHLSFGQGVHACLAAQLISLQLKWFYVALLNRFPGIRTAGEPIWNENLEFRSLRSLPLSLR

SEQ ID NO: 179 - DNA, 2103 bp, Psilocybe cubensis
atggaagccatcaaaaaagtgttcgagaacaaaaaagcagaaggcattccggttctggttacctttgttaccgcaggttatccgcgtccggaagataccgttccgattctgctggcaatggaagccggtggtgcagatattattgaactgggtatgccgtttagcgatccgattgcagatggtccggttattcaagaaaccaataccattgcagttgccaaccaggttgattataccaccgttctgggtcagctgcgtgaagcacgtaaacagggtctgaaagcaccggttctgctgatgggctattacaacccgattctggcatatggtgaagatcgtagcattcaggatgcagccgaagcgggtgcaaatggctttattatggttgatctgcctccggaagaggcagttgcatttcgtgaaaaatgcattaaaagcaacctgagctatgttccgctgattgcaccgagcaccacactgagccgtatcaaatttctgagcaccattgccgatacctttatctatgttgttagcaaaatgggtacaaccggtagcagcgaaaaagttgcaatgaataatgcactgccgaccattattgatcgtattcgtgaatatgcagaagttccgctggcagttggttttggtgttgcaacccgtgcacattttaactatgttgcagatagcggtgccgatggtgttgttattggcaccaaactggttaacgtgattaaagaaagtccgcagggtgaagcaccgaaaaatgttgaagcatattgtcgtgaaatgagccagaaaggtgaaaccaatcgtgttaaaagccctccgaccgcacgtgcagcaagcagcgaatcaattccggttgttgttccgagcgttctgcctgcacgttttggtgaatttggtggtcagtatgttccggaagcactggttgattgtctggttgaactggaagaagcacataaaagcgcaatggcagatccggaatttcagaaagaactgcagagccatgcaggttatgcaaatcgtccgagccagatttatctggcggaaaatctgaccaaagatgcaggcggtgcgaatatttggctgaaacgtgaagatctgaatcataccggtagccacaaaattaacaatgcactgggtcagatcctgctggcacgtcgtattggtaaaacccgtattattgccgaaaccggtgcaggtcagcatggtgttgccaccgcaaccgtttgtgcaaaatttggtatggaatgcgtgatttatatgggtgcagaagatgttcgtcgtcaggcactgaatgtttttcgtattgaaatgctgggtgccaaagttgttccggttaccagcggtagctgtaccctgaaagatgccgttaatgaagcctttcgtgattgggttaccaatctgagcacaacccattatctggttggtagcgttattggtccgcatccgtttccgaccattgttcgtgatttccagaaagtgattggccaagaaattaaagcacagatgctggcagcacgtggtaaactgccggatgttgttgttgcatgtgttggtggtggtagcaatgcaattggcaccttttatgatttcatcggcgataaaagcgttcgtctggtgggtgtagaagctggcggtgaaggtattgatggtgatcgtcatagcgcaaccctgagcatgggtcagccaggtgttctgcatggtgtgcgtacctatattctgcaggataaagcaggtcagattatcgaaacccatagcattagcgcaggtctggattatcctggtgttggtcctgaacatgcatggctgaaagatagcaaacgtgccgaatatgttgttgcgaccgatgaagaggcactgcgtggttttcgcatgctgacacagcgcgaaggtattattccggcactggaaagcagccatgccatttgggaagcagttcgtattgcacgtaccatgagcaaagatcaggatctggttgtttgcctgagcggtcgtggtgataaagatgttgagcagattagccagctgctgccgaaatgggcagatattctggattggcatgttagcagtcatgcagttggtcatacaaccaaattctaa

SEQ ID NO: 180 - protein, 700 aa, Psilocybe cubensis [sequence omitted]

SEQ ID NO: 181 - DNA, 2103 bp, Psilocybe cubensis
atggaagccatcaaaaaagtgttcgagaacaaaaaagcagaaggcattccggttctggttacctttgttaccgcaggttatccgcgtccggaagataccgttccgattctgctggcaatggaagccggtggtgcagatattattgaactgggtatgccgtttagcgatccgattgcagatggtccggttattcaagaaaccaataccattgcagttgccaaccaggttgattataccaccgttctgggtcagctgcgtgaagcacgtaaacagggtctgaaagcaccggttctgctgatgggctattacaacccgattctggcatatggtgaagatcgtagcattcaggatgcagccgaagcgggtgcaaatggctttattatggttgatctgcctccggaagaggcagttgcatttcgtgaaaaatgcattaaaagcaacctgagctatgttccgctgattgcaccgagcaccacactgagccgtatcaaatttctgagcaccattgccgatacctttatctatgttgttagcaaaatgggtacaaccggtagcagcgaaaaagttgcaatgaataatgcactgccgaccattattgatcgtattcgtgaatatgcagaagttccgctggcagttggttttggtgttgcaacccgtgcacattttaactatgttgcagatagcggtgccgatggtgttgttattggcaccaaactggttaacgtgattaaagaaagtccgcagggtgaagcaccgaaaaatgttgaagcatattgtcgtgaaatgagccagaaaggtgaaaccaatcgtgttaaaagccctccgaccgcacgtgcagcaagcagcgaatcaattccggttgttgttccgagcgttctgcctgcacgttttggtgaatttggtggtcagtatgttccggaagcactggttgattgtctggttgaactggaagaagcacataaaagcgcaatggcagatccggaatttcagaaagaactgcagagccatgcaggttatgcaaatcgtccgagccagatttatctggcggaaaatctgaccaaagatgcaggcggtgcgaatatttggctgaaacgtgaagatctgaatcataccggtagccacaaaattaacaatgcactgggtcagatcctgctggcacgtcgtattggtaaaacccgtattattgccgaaaccggtgcaggtcagcatggtgttgccaccgcaaccgtttgtgcaaaatttggtatggaatgcgtgatttatatgggtgcagaagatgttcgtcgtcaggcactgaatgtttttcgtattgaaaccctgggtgccaaagttgttccggttaccagcggtagctgtaccctgaaagatgccgttgatgaagcctttcgtgattgggttaccaatctgagcacaacccattatctggttggtagcgttattggtccgcatccgtttccgaccattgttcgtgatttccagaaagtgattggccaagaaattaaagcacagatgctggcagcacgtggtaaactgccggatgttgttgttgcatgtgttggtggtggtagcaatgcaattggcaccttttatgatttcatcggcgataaaagcgttcgtctggtgggtgtagaagctggcggtgaaggtattgatggtgatcgtcatagcgcaaccctgagcatgggtcagccaggtgttctgcatggtgtgcgtacctatattctgcaggataaagcaggtcagattatcgaaacccatagcattagcgcaggtctggattatcctggtgttggtcctgaacatgcatggctgaaagatagcaaacgtgccgaatatgttgttgcgaccgatgaagaggcactgcgtggttttcgcatgctgacacagcgcgaaggtattattccggcactggaaagcagccatgccatttgggaagcagttcgtattgcacgtaccatgagcaaagatcaggatctggttgtttgcctgagcggtcgtggtgataaagatgttgagcagattagccagctgctgccgaaatgggcagatattctggattggcatgttagcagtcatgcagttggtcatacaaccaaattctaa

SEQ ID NO: 182 - protein, 700 aa, Psilocybe cubensis
MEAIKKVFENKKAEGIPVLVTFVTAGYPRPEDTVPILLAMEAGGADIIELGMPFSDPIADGPVIQETNTIAVANQVDYTTVLGQLREARKQGLKAPVLLMGYYNPILAYGEDRSIQDAAEAGANGFIMVDLPPEEAVAFREKCIKSNLSYVPLIAPSTTLSRIKFLSTIADTFIYVVSKMGTTGSSEKVAMNNALPTIIDRIREYAEVPLAVGFGVATRAHFNYVADSGADGVVIGTKLVNVIKESPQGEAPKNVEAYCREMSQKGETNRVKSPPTARAASSESIPVVVPSVLPARFGEFGGQYVPEALVDCLVELEEAHKSAMADPEFQKELQSHAGYANRPSQIYLAENLTKDAGGANIWLKREDLNHTGSHKINNALGQILLARRIGKTRIIAETGAGQHGVATATVCAKFGMECVIYMGAEDVRRQALNVFRIETLGAKVVPVTSGSCTLKDAVDEAFRDWVTNLSTTHYLVGSVIGPHPFPTIVRDFQKVIGQEIKAQMLAARGKLPDVVVACVGGGSNAIGTFYDFIGDKSVRLVGVEAGGEGIDGDRHSATLSMGQPGVLHGVRTYILQDKAGQIIETHSISAGLDYPGVGPEHAWLKDSKRAEYVVATDEEALRGFRMLTQREGIIPALESSHAIWEAVRIARTMSKDQDLVVCLSGRGDKDVEQISQLLPKWADILDWHVSSHAVGHTTKF

SEQ ID NO: 183 - DNA, 1422 bp, Saccharomyces cerevisiae
atggcaaaggataatagtgagaagctgcaggtgcagggagaggagaaaaagtccaagcaaccggttaatttcctgcctcagggtaaatggctgaagccaaatgaaatcgaatatgagtttggtgggactactggtgttattggtatgctgatcgggtttccactgctaatgtactatatgtggatttgtgcggaattttatcacggtaaggttgccctacccaaggctggtgaatcgtggatgcactttatcaagcacctataccagttagtcttggagaacggtatcccagaaaagtatgactggactattttcttaacattttgggtgtttcagatcattttctactatacgttgcccgggatttggacaaaaggtcaaccattgtctcatttgaagggaaaacaattgccttacttttgtaatgccatgtggaccttgtatgtaactaccactttggtcttggttttgcactttaccaatctttttagattgtatgtcattattgaccgttttgggaggatcatgacatgtgccattatttcagggtttgccttctccatcatattgtacttatggactttatttatctcacatgactatcatagaatgacaggaaaccatctatatgatttcttcatgggagctccactaaaccctaggtgggggattttggacttgaagatgtttttcgaggttagattaccttggttcaccctttactttatcactttgggtgcctgtttgaagcagtgggagacttacggctatgtgacaccacaattgggggttgtcatgttagctcattggttgtacgcgaacgcatgtgctaaaggtgaagaattgattgttccaacctgggacatggcttacgaaaagtttggatttatgctgatcttctggaatattgccggtgtcccatacacttactgtcattgtacgttgtatttgtactaccatgacccatctgaatatcactggtctacactgtacaatgtttcgctgtacgttgttctattatgcgcctactacttctttgacacggcaaatgctcagaaaaatgccttcagaaagcaaatgtctggtgacaagacaggtaggaagactttcccatttttgccataccaaattttgaagaatccaaagtatatggttacctccaatggatcgtacctattgattgatggttggtacactttggctagaaaaattcactacactgccgattggactcaatctctcgtttgggccttgtcttgcgggttcaactcggtgttcccatggtttttcccagtattcttccttgttgtcctgattcacagagccttcagagaccaagcaaaatgtaagagaaagtacggaaaagattgggatgagtattgtaaacattgcccttacgtctttattccttatgttttctag

SEQ ID NO: 184 - DNA, 1191 bp, Saccharomyces cerevisiae
atgactgtcaccataaaagaattgactaaccacaactacattgaccacgaactatcagccactttagactcaacggatgcgttcgagggtcccgagaagttgctggaaatctggttcttccctcacaagaagtccatcacgaccgaaaagacattaagaaatattggcatggatagatggatcgagattttgaaattagtgaaatgcgaagttctttccatgaagaagactaaagaactggatgcctttttgttgagtgagtcttccctcttcgtcttcgatcacaaattgacgatgaagacgtgcggtactacaaccacattgttctgtctcgaaaagcttttccagatcgttgagcaagagttatcgtgggctttccgcacaacacaagggggcaagtacaaaccatttaaagtgttttattctagacgatgtttccttttcccctgtaagcaagccgctatccatcaaaactgggctgacgaagtcgactatttgaacaaatttttcgacaatggtaaaagttattccgtgggaagaaatgacaagagcaaccactggaacctgtacgtcaccgagacggaccgctccacacctaagggaaaggagtacatcgaggatgacgacgaaactttcgaagtactgatgacggagctggacccagaatgcgctagtaagtttgtttgcgggcctgaggcatccacaaccgctctcgtggagccaaacgaagataagggccacaacctcggctaccaaatgactaaaaatacaaggcttgacgaaatatatgtcaactcggcccaagactccgatttatcatttcaccacgatgcatttgcgttcacgccatgtggatactcatccaatatgattctcgctgaaaaatactattacaccctgcacgtgactccggaaaagggttggtcttacgcctctttcgaaagtaacatacccgtatttgacatttcccaagggaagcaagacaacttggacgttcttctacatattctgaacgtttttcaaccaagagagttctcgatgaccttttttaccaaaaattatcagaaccaatccttccaaaaactactaagcatcaacgagtcactgcccgactacatcaagttagacaaaattgtttatgatctggacgactaccaccttttctatatgaaattgcagaagaaaatatga

SEQ ID NO: 185 - DNA, 1245 bp, Saccharomyces cerevisiae
atgtttgtcagggttaaattgaataaaccagtaaaatggtataggttctatagtacgttggattcacattccctaaagttacagagcggctcgaagtttgtaaaaataaagccagtaaataacttgaggagtagttcatcagcagatttcgtgtccccaccaaattccaaattacaatctttaatctggcagaaccctttacaaaatgtttatataactaaaaaaccatggactccatccacaagagaagcgatggttgaattcataactcatttacatgagtcataccccgaggtgaacgtcattgttcaacccgatgtggcagaagaaatttcccaggatttcaaatctcctttggagaatgatcccaaccgacctcatatactttatactggtcctgaacaagatatcgtaaacagaacagacttattggtgacattgggaggtgatgggactattttacacggcgtatcaatgttcggaaatacgcaagttcctccggttttagcatttgctctgggcactctgggctttctatcaccgtttgattttaaggagcataaaaaggtctttcaggaagtaatcagctctagagccaaatgtttgcatagaacacggctagaatgtcatttgaaaaaaaaggatagcaactcatctattgtgacccatgctatgaatgacatattcttacataggggtaattcccctcatctcactaacctggacattttcattgatggggaatttttgacaagaacgacagcagatggtgttgcattggccactccaacgggttccacagcatattcattatcagcaggtggatctattgtttccccattagtccctgctattttaatgacaccaatttgtcctcgctctttgtcattccgaccactgattttgcctcattcatcccacattaggataaagataggttccaaattgaaccaaaaaccagtcaacagtgtggtaaaactttctgttgatggtattcctcaacaggatttagatgttggtgatgaaatttatgttataaatgaggtcggcactatatacatagatggtactcagcttccgacgacaagaaaaactgaaaatgactttaataattcaaaaaagcctaaaaggtcagggatttattgtgtcgccaagaccgagaatgactggattagaggaatcaatgaacttttaggattcaattctagctttaggctgaccaagagacagactgataatgattaa

SEQ ID NO: 186 - protein, 414 aa, Saccharomyces cerevisiae
MFVRVKLNKPVKWYRFYSTLDSHSLKLQSGSKFVKIKPVNNLRSSSSADFVSPPNSKLQSLIWQNPLQNVYITKKPWTPSTREAMVEFITHLHESYPEVNVIVQPDVAEEISQDFKSPLENDPNRPHILYTGPEQDIVNRTDLLVTLGGDGTILHGVSMFGNTQVPPVLAFALGTLGFLSPFDFKEHKKVFQEVISSRAKCLHRTRLECHLKKKDSNSSIVTHAMNDIFLHRGNSPHLTNLDIFIDGEFLTRTTADGVALATPTGSTAYSLSAGGSIVSPLVPAILMTPICPRSLSFRPLILPHSSHIRIKIGSKLNQKPVNSVVKLSVDGIPQQDLDVGDEIYVINEVGTIYIDGTQLPTTRKTENDFNNSKKPKRSGIYCVAKTENDWIRGINELLGFNSSFRLTKRQTDND

SEQ ID NO: 187 - DNA, 1413 bp, H. annuus
atggaacgtacaccgcatattgcaattgttccgagtcctggtatgggtcatctgattccgctggttgaatttgcaaaacgcctgaaaaacaaccacaatattagcagcacctttatcattccgaatgaaggtccgctgaccaaaagccagcaggcatttctggatagcctgccgaatggtctgaatcatgttattctgcctccggttagctttgatgatctgccgaacgatattcgtatggaaacccgtattagcctgatggttacccgtagcctggatagtctgcgtgaagcagttaaaagcctggttgttgaaaccaatatggttgcactgtttgttgacctgtttggcaccgatgcatttgatgttgcaattgaatttggtgttagcccgtatgttttttttccgagcaccgcaatggcactgagcctgtttctgtatctgcctaaactggatcagatggttagctgtgaatatcgcgatctgccggaaccggtgcagattccgggttgtattccggttcgtggtgaagatctgctggatccggttcaagaacgtaaaaatgatgcctataaatgggtgctgcataacgcaaaacgttatcgtatggcagaaggtattgccgtcaatagctttaaagaactggaaggtggtgcactgaaagcactgctggaagatcagcctggtaaaccgcgtgtttatccggttggtccgctggtgcaggcaggtagcagcagtgatgttgatggtagcggttgtctgcgttggctggatggtcagccgtgtggtagcgttctgtatattagctttggtagtggtggcaccctgagcagcaatcagctgaatgaactggcactgggtttagaactgagcgaacagcgttttatttgggttgttcgtagccctaatgataaaccgaatgccacctattttaacagccatggtcatgaagatcctctgggttttctgccgaaaggttttctggaacgcaccaaaggtattggttttgttgtgccgagctgggcaccgcaggcacagattctgagccatagcagtaccggtggttttctgacccattgtggctggaatagcattctggaaaccgttgttcatggtgttccggttattgcatggcctctgtatgcagaacagcgtatgaatgcagttagcctgaccgaaggtattaaagttgcactgcgtccgaaagttgatgaaaatggtattgttagtcgtgtggaaattgcccgtgttgttaaaggtctgattgaaggtgaagaaggtaaaccgattcgtagccgtattcgtgaactgaaagatgcagcaagcaatgttctgagcaaagatggttgtagcaccaaaacactggaacagctggcaagcaaactgaaagccaaaaacaacatcagcatttaa

SEQ ID NO: 188 - protein, 470 aa, H. annuus
MERTPHIAIVPSPGMGHLIPLVEFAKRLKNNHNISSTFIIPNEGPLTKSQQAFLDSLPNGLNHVILPPVSFDDLPNDIRMETRISLMVTRSLDSLREAVKSLVVETNMVALFVDLFGTDAFDVAIEFGVSPYVFFPSTAMALSLFLYLPKLDQMVSCEYRDLPEPVQIPGCIPVRGEDLLDPVQERKNDAYKWVLHNAKRYRMAEGIAVNSFKELEGGALKALLEDQPGKPRVYPVGPLVQAGSSSDVDGSGCLRWLDGQPCGSVLYISFGSGGTLSSNQLNELALGLELSEQRFIWVVRSPNDKPNATYFNSHGHEDPLGFLPKGFLERTKGIGFVVPSWAPQAQILSHSSTGGFLTHCGWNSILETVVHGVPVIAWPLYAEQRMNAVSLTEGIKVALRPKVDENGIVSRVEIARVVKGLIEGEEGKPIRSRIRELKDAASNVLSKDGCSTKTLEQLASKLKAKNNISI

SEQ ID NO: 189 - DNA, 1413 bp, H. annuus
atggaacgtacaccgcatattgcaattgttccgagtcctggtatgggtcatctgattccgctggttgaatttgcaaaacgcctgaaaaacaaccacaatattagcagcacctttatcattccgaacgatggtccgctgagcattagccagaaagcatttttagatagcctgccgatgggtctgaaccatattattctgcctccggtgaattttgatgatctgccgcaggatacccagatggaaacccgtattagcctgatggttacccgtagcctggatagtctgcgtgaagtgtttaaaagcctggttgcagaacataacatggtggcactgtttattgacctgtttggcaccgatgcatttgatgttgcaattgaatttggtgttagcccgtatgttttttttccgagcaccgcaatggcactgagcctgtttctgtatctgccgaaactggatcaaatgaccagctgtgaatatcgcgatctgccggaaccggtgcagattccgggttgtctgccggttcgtggtcaggatctgctggatccggttcaggatcgtaaaaatgatgcatataaatgggtgctgcataacgccaaacgttatatgatggcagaaggtattgccgtcaacagctttaaagaactggaaggtggtgcactgaaagcactgctggaagcagaaccgggtaaaccgaaaatctatccggttggtcctctgattcagaccggtagcagcagtgatgttgatggtagcggttgtctgaaatggctggatggtcagccgtgtggtagcgttctgtatattagctttggtagtggtggcaccctgagcagcaatcagctgaatgaactggcaatgggtttagaactgagcgaacagcgttttatttgggttgttcgtagcccgagcgatcaggcaaatgcaacctattttaacagccatggtcataaagatccgctgggttttctgcctaaaggttttctggaacgcaccaaaggtaatggttttgttgttagcagctgggcaccgcaggcacagattctgagccatagcagtaccggtggttttctgacccattgtggctggaatagcattctggaaaccgttgttcatggtgttccggttattgcatggcctctgtatgcagaacagaaaatgaatgcagttagcctgaccgaaggtattaaagttgcactgcgtccgaccgttggtgaaaatggtattattggtcgtgttgaaattgcccgtgttgtgaaaagcctgttagaaggtgaagaaggtaaagcaattcgtagccgtattcgtgatctgaaagatgcagcagcaaatgtgattagcaaagatggttgtagcaccaaaacactggataaactggcaagcatgctgaagaacaaaaacaaactgtccctgtaa

SEQ ID NO: 190 - protein, 470 aa, H. annuus
MERTPHIAIVPSPGMGHLIPLVEFAKRLKNNHNISSTFIIPNDGPLSISQKAFLDSLPMGLNHIILPPVNFDDLPQDTQMETRISLMVTRSLDSLREVFKSLVAEHNMVALFIDLFGTDAFDVAIEFGVSPYVFFPSTAMALSLFLYLPKLDQMTSCEYRDLPEPVQIPGCLPVRGQDLLDPVQDRKNDAYKWVLHNAKRYMMAEGIAVNSFKELEGGALKALLEAEPGKPKIYPVGPLIQTGSSSDVDGSGCLKWLDGQPCGSVLYISFGSGGTLSSNQLNELAMGLELSEQRFIWVVRSPSDQANATYFNSHGHKDPLGFLPKGFLERTKGNGFVVSSWAPQAQILSHSSTGGFLTHCGWNSILETVVHGVPVIAWPLYAEQKMNAVSLTEGIKVALRPTVGENGIIGRVEIARVVKSLLEGEEGKAIRSRIRDLKDAAANVISKDGCSTKTLDKLASMLKNKNKLSL

SEQ ID NO: 191 - DNA, 1416 bp, S. pennellii
atggcacagattccgcatattgcaattctgccgagtcctggtatgggtcatctgattccgctggttgaatttgccaaacgtatttttctgcatcaccagtttagcgttagcctgatcctgccgaccgatggtccgattagcaatgcacagaaaatctttctgaatagcctgccgagcagcatggattatcatctgctgcctccggttaattttgatgatctgccggaagatgtgaaaattgaaacccgtattagcctgaccgttagccgtagtctgaccagcctgcgtcaggttctggatagcattattgaaagcaaacgtaccgttgcactggttgttgacctgtttggcaccgatgcatttgatgttgcaattgatctgaaaatcagcccgtatatcttttttccgagcaccgcaatggcactgagcctgtttctgtatctgccgaatctggatgaaaccgttagctgtgaatatcgtgatctgcctgatccgattcagattccgggttgtaccccgattcatggtaaagatctgctggatccggtgcaggatcgtaatgatgaaagctataaatggctgctgcatcacgttaaacgttatggtatggcagaaggcattatcgtcaacagctttaaagaactggaaggtggtgcaattggtgcactgcagaaagatgaaccgggtaaaccgaccgtttatccggttggtccgctgattcagatggatagcggtagcaaagttgatggtagcgaatgtatgacctggctggatgaacagcctcgtggtagcgttctgtatattagctatggtagcggtggcaccctgagccatgaacagctgattgaagttgcagcaggtctggaaatgagcgaacagcgttttctgtgggttgttcgttgtccgaatgataaaattgcaaacgccaccttttttaacgttcaggatagcaccaatccgctggaatttctgccgaaaggttttctggaacgtaccaaaggttttggtctggtgctgccgaattgggcaccgcaggcacgtattctgagtcatgaaagcaccggtggttttctgacccattgtggttggaatagcaccctggaaagcgttgttcatggtgtgccgctgattgcatggcctctgtatgcagaacagaaaatgaatgcagttatgctgagcgaggatattaaagttgcactgcgtccgaaagtgaatgaagaaaatggtattgttggtcgcctggaaattgccaaagttgttaaaggtctgatggaaggtgaagaaggtaaaggcgttcgtagccgtatgcgcgatctgaaagatgccgcagcaaaagttctgagcgaagatggtagcagcaccaaagcactggcagaactggcaaccaaactgaaaaaaaaggtcagcaacaattaa

SEQ ID NO: 192 - protein, 471 aa, S. pennellii
MAQIPHIAILPSPGMGHLIPLVEFAKRIFLHHQFSVSLILPTDGPISNAQKIFLNSLPSSMDYHLLPPVNFDDLPEDVKIETRISLTVSRSLTSLRQVLDSIIESKRTVALVVDLFGTDAFDVAIDLKISPYIFFPSTAMALSLFLYLPNLDETVSCEYRDLPDPIQIPGCTPIHGKDLLDPVQDRNDESYKWLLHHVKRYGMAEGIIVNSFKELEGGAIGALQKDEPGKPTVYPVGPLIQMDSGSKVDGSECMTWLDEQPRGSVLYISYGSGGTLSHEQLIEVAAGLEMSEQRFLWVVRCPNDKIANATFFNVQDSTNPLEFLPKGFLERTKGFGLVLPNWAPQARILSHESTGGFLTHCGWNSTLESVVHGVPLIAWPLYAEQKMNAVMLSEDIKVALRPKVNEENGIVGRLEIAKVVKGLMEGEEGKGVRSRMRDLKDAAAKVLSEDGSSTKALAELATKLKKKVSNN

SEQ ID NO: 193 - DNA, 1425 bp, A. thaliana
atggccaaacagcaagaagcagaactgatttttatcccgtttccgattccgggtcatattctggcaaccattgaactggcaaaacgtctgattagccatcagccgagccgtattcataccattaccattctgcattggagcctgccgtttctgccgcagagcgataccattgcatttctgaaaagcctgattgaaaccgaaagtcgtattcgcctgattaccctgccggatgttcagaatccgcctccgatggaactgtttgttaaagcaagcgaaagctacatcctggaatacgtgaaaaaaatggttccgctggttcgtaatgcactgagcaccctgctgagcagccgtgatgaaagcgatagcgttcatgttgcaggtctggttctggattttttctgtgttccgctgattgatgtgggcaatgaatttaatctgccgagctatatctttctgacctgtagcgcaagctttctgggtatgatgaaatatctgctggaacgtaatcgtgaaaccaaaccggaactgaatcgtagcagtgatgaagaaaccattagcgttccgggttttgttaatagcgtgccggttaaagttctgcctccgggtctgtttaccaccgaaagctatgaagcatgggttgaaatggcagaacgttttccggaagcaaaaggtattctggtgaatagctttgaaagcctggaacgcaatgccttcgattattttgatcgtcgtccggataactatccgcctgtttatccgattggtccgattctgtgtagcaatgatcgtccgaatctggatctgagcgaacgtgatcgtattctgaaatggctggatgatcagccggaaagcagcgttgtgtttctgtgctttggtagcctgaaaagtctggcagcaagccagattaaagaaattgcacaggcactggaactggtgggtattcgttttctgtggtcaattcgtaccgatccgaaagaatatgcaagcccgaatgaaattctgcctgatggttttatgaatcgcgttatgggtctgggtttagtttgtggttgggcaccgcaggttgaaatcctggcacataaagcaattggtggttttgtgagccattgcggttggaatagcattctggaaagtctgcgttttggtgttccgattgcaacctggccgatgtatgcagaacagcagctgaatgcatttaccatcgttaaagaattaggtctggccctggaaatgcgtctggattatgttagcgaatatggcgaaattgtgaaagccgatgaaattgccggtgcagttcgtagcctgatggatggtgaagatgttccgcgtcgtaaactgaaagaaatcgcagaagcaggtaaagaagcagttatggatggcggtagcagctttgttgcagttaaacgttttattgatggcctgtaa

SEQ ID NO: 194 - protein, 474 aa, A. thaliana
MAKQQEAELIFIPFPIPGHILATIELAKRLISHQPSRIHTITILHWSLPFLPQSDTIAFLKSLIETESRIRLITLPDVQNPPPMELFVKASESYILEYVKKMVPLVRNALSTLLSSRDESDSVHVAGLVLDFFCVPLIDVGNEFNLPSYIFLTCSASFLGMMKYLLERNRETKPELNRSSDEETISVPGFVNSVPVKVLPPGLFTTESYEAWVEMAERFPEAKGILVNSFESLERNAFDYFDRRPDNYPPVYPIGPILCSNDRPNLDLSERDRILKWLDDQPESSVVFLCFGSLKSLAASQIKEIAQALELVGIRFLWSIRTDPKEYASPNEILPDGFMNRVMGLGLVCGWAPQVEILAHKAIGGFVSHCGWNSILESLRFGVPIATWPMYAEQQLNAFTIVKELGLALEMRLDYVSEYGEIVKADEIAGAVRSLMDGEDVPRRKLKEIAEAGKEAVMDGGSSFVAVKRFIDGL

SEQ ID NO: 195 - DNA, 1413 bp, R. serpentina
atggaacatacaccgcatattgcaatggttccgacacctggtatgggtcatctgattccgctggttgaatttgcaaaacgtctggttctgcgtcataattttggtgtgacctttattatcccgaccgatggtccgctgccgaaagcacagaaaagctttctggatgcactgcctgccggtgttaattatgttctgctgcctccggttagctttgatgatctgcctgcagatgttcgtattgaaacccgtatttgtctgaccattacacgtagcctgccgtttgttcgtgatgcagttaaaaccctgctggcaaccaccaaactggcagcactggttgttgacctgtttggcaccgatgcatttgatgttgccattgaatttaaagtgagcccgtatatcttttatccgaccaccgcaatgtgtctgagcctgttttttcatctgccgaaactggatcagatggttagctgtgaatatcgtgatgtgccggaaccgctgcagattccgggttgtattccgattcatggtaaagattttctggatccggcacaggatcgtaaaaatgatgcatataaatgtctgctgcatcaggccaaacgttatcgtctggccgaaggtattatggtgaatacctttaatgatctggaaccgggtccgctgaaagcactgcaagaagaagatcagggtaaaccgcctgtttatccgattggtcctctgattcgtgcagatagcagcagcaaagttgatgattgtgaatgtctgaaatggctggatgatcagcctcgtggtagcgttctgtttattagctttggtagcggtggtgcagttagccataatcagtttattgaactggcactgggtcttgaaatgagcgaacagcgttttctgtgggttgttcgtagcccgaatgataaaattgcaaacgcaacctattttagcattcagaatcagaatgatgcactggcatatctgccggaaggttttctggaacgtaccaaaggtcgttgtctgctggttccgagctgggcaccgcagaccgaaattctgagccatggtagcaccggtggttttctgacccattgtggttggaatagcattctggaaagcgttgttaatggtgttccgctgattgcatggcctctgtatgcagaacagaaaatgaatgcagttatgctgaccgaaggtctgaaagttgcactgcgtccgaaagccggtgaaaatggtctgattggtcgtgttgaaattgccaatgccgttaaaggtctgatggaaggtgaagaaggcaaaaaattccgtagcaccatgaaagatctgaaagatgcagcaagccgtgcactgagtgatgatggtagcagtaccaaagcactggccgaactggcatgtaaatgggaaaacaaaattagcagcacctaa

SEQ ID NO: 196 - protein, 470 aa, R. serpentina
MEHTPHIAMVPTPGMGHLIPLVEFAKRLVLRHNFGVTFIIPTDGPLPKAQKSFLDALPAGVNYVLLPPVSFDDLPADVRIETRICLTITRSLPFVRDAVKTLLATTKLAALVVDLFGTDAFDVAIEFKVSPYIFYPTTAMCLSLFFHLPKLDQMVSCEYRDVPEPLQIPGCIPIHGKDFLDPAQDRKNDAYKCLLHQAKRYRLAEGIMVNTFNDLEPGPLKALQEEDQGKPPVYPIGPLIRADSSSKVDDCECLKWLDDQPRGSVLFISFGSGGAVSHNQFIELALGLEMSEQRFLWVVRSPNDKIANATYFSIQNQNDALAYLPEGFLERTKGRCLLVPSWAPQTEILSHGSTGGFLTHCGWNSILESVVNGVPLIAWPLYAEQKMNAVMLTEGLKVALRPKAGENGLIGRVEIANAVKGLMEGEEGKKFRSTMKDLKDAASRALSDDGSSTKALAELACKWENKISST

SEQ ID NO: 197 - DNA, 1443 bp, A. thaliana
atggaagaaagcaaaacaccgcatgttgcaattattccgagtcctggtatgggtcatctgattccgctggttgaatttgcaaaacgtctggttcatctgcatggtctgaccgttacctttgttattgccggtgaaggtccgcctagcaaagcacagcgtaccgttctggatagcctgccgagcagcattagcagcgtttttctgcctccggttgatctgaccgatctgagcagcagcacccgtattgaaagccgtattagcctgacagttacccgtagcaatccggaactgcgtaaagtttttgatagctttgttgaaggtggtcgtctgccgaccgcactggttgttgacctgtttggcaccgatgcatttgatgttgcagttgaatttcatgtgcctccgtatatcttttatccgaccaccgcaaatgttctgagcttttttctgcatctgccgaaactggatgaaaccgttagctgtgaatttcgtgaactgaccgaaccgctgatgctgcctggttgtgttccggttgcaggtaaagattttctggatccggcacaggatcgtaaagatgatgcatataaatggctgctgcataacaccaaacgttataaagaagcagaaggcattctggtcaacaccttttttgaactggaaccgaatgcaattaaagccctgcaagaacctggtctggataaaccgcctgtttatccggttggtcctctggttaatattggtaaacaagaagccaaacagaccgaagaaagcgaatgtctgaaatggctggataatcagccgctgggtagcgttctgtatgttagctttggtagcggtggcaccctgacctgtgaacagctgaatgaactggcactgggtttagcagatagcgaacagcgttttctgtgggttattcgtagcccgagcggtattgcaaatagcagttattttgatagtcacagccagacagatccgctgacctttctgccaccgggttttctggaacgtaccaaaaaacgtggttttgtgattccgttttgggcaccgcaggcacaggttctggcacatccgagcaccggtggttttctgacccattgtggttggaatagcaccctggaaagcgttgttagcggtattccgctgattgcatggcctctgtatgcagaacagaaaatgaatgcagttctgctgagcgaagatattcgtgcagcactgcgtccgcgtgccggtgatgatggtctggttcgtcgtgaagaagttgcacgcgttgttaaaggtctgatggaaggtgaagaaggtaaaggcgttcgcaacaaaatgaaagaactgaaagaggcagcctgtcgcgttctgaaagatgacggcaccagcaccaaagcactgagcctggttgcactgaaatggaaagcacataaaaaagagctggaacagaacggcaaccactaa

SEQ ID NO: 198 - protein, 480 aa, A. thaliana
MEESKTPHVAIIPSPGMGHLIPLVEFAKRLVHLHGLTVTFVIAGEGPPSKAQRTVLDSLPSSISSVFLPPVDLTDLSSSTRIESRISLTVTRSNPELRKVFDSFVEGGRLPTALVVDLFGTDAFDVAVEFHVPPYIFYPTTANVLSFFLHLPKLDETVSCEFRELTEPLMLPGCVPVAGKDFLDPAQDRKDDAYKWLLHNTKRYKEAEGILVNTFFELEPNAIKALQEPGLDKPPVYPVGPLVNIGKQEAKQTEESECLKWLDNQPLGSVLYVSFGSGGTLTCEQLNELALGLADSEQRFLWVIRSPSGIANSSYFDSHSQTDPLTFLPPGFLERTKKRGFVIPFWAPQAQVLAHPSTGGFLTHCGWNSTLESVVSGIPLIAWPLYAEQKMNAVLLSEDIRAALRPRAGDDGLVRREEVARVVKGLMEGEEGKGVRNKMKELKEAACRVLKDDGTSTKALSLVALKWKAHKKELEQNGNH

SEQ ID NO: 199 - DNA, 1425 bp, A. thaliana-S. rebaudiana hybrid
atgggcaaacaagaagatgccgaactggttattattccgtttccgtttagcggtcatattctggcaaccattgaactggcaaaacgtctgattagccaggataatccgcgtattcataccattaccattctgtattggggtctgccgtttattccgcaggcagataccattgcatttctgcgtagcctggttaaaaatgaaccgcgtatccgtctggttaccctgccggaagttcaggatccgcctccgatggaactgtttgttgaatttgcagaaagctatatcctggaatatgtgaaaaaaatggtgccgattattcgtgaagcactgagcaccctgctgagcagccgtgatgaaagcggtagcgttcgtgttgcaggtctggttctggattttttctgtgttccgatgattgatgtgggcaacgaatttaatctgccgagctatatctttctgacctgtagcgcaggttttctgggtatgatgaaatatctgccggaacgtcatcgtgaaatcaaaagcgaatttaaccgcagctttaacgaagaactgaatctgattccgggttatgttaatagcgttccgaccaaagtgctgccgagcggtctgtttatgaaagaaacctatgaaccgtgggtagaactggccgaacgttttccggaagcaaaaggtattctggttaatagctataccgcactggaaccgaatggcttcaaatatttcgatcgttgtccggataactacccgaccatttatccgattggtccgattctgtgtagcaatgatcgtccgaatctggatctgagcgaacgtgatcgtattctgaaatggctggatgatcagccggaaagcagcgttgtgtttctgtgctttggtagcctgaaaagcctggcagcaagccagattaaagaaattgcacaggccctggaactggttggtattcgttttctgtggtcaattcgtaccgatccgaaagaatatgcaagcccgaacgaaatcctgccggatggttttatgaatcgtgttatgggtctgggtttagtttgtggttgggcaccgcaggttgaaattctggcacataaagcaattggtggttttgttagccattgcggttggaatagcattctggaaagcctgcgttttggtgtgccgattgcaacctggccgatgtatgcagaacagcagctgaatgcatttaccattgtgaaagaattaggtctggcactggaaatgcgtctggattatgttagcgaatatggcgaaattgtcaaagccgatgaaattgccggtgcagttcgtagcctgatggatggtgaagatgttccgcgtcgtaaactgaaagaaatcgcagaagcaggtaaagaagcagttatggatggcggtagcagctttgttgcagttaaacgttttattgatggcctgtaa

SEQ ID NO: 200 - protein, 474 aa, A. thaliana-S. rebaudiana hybrid
MGKQEDAELVIIPFPFSGHILATIELAKRLISQDNPRIHTITILYWGLPFIPQADTIAFLRSLVKNEPRIRLVTLPEVQDPPPMELFVEFAESYILEYVKKMVPIIREALSTLLSSRDESGSVRVAGLVLDFFCVPMIDVGNEFNLPSYIFLTCSAGFLGMMKYLPERHREIKSEFNRSFNEELNLIPGYVNSVPTKVLPSGLFMKETYEPWVELAERFPEAKGILVNSYTALEPNGFKYFDRCPDNYPTIYPIGPILCSNDRPNLDLSERDRILKWLDDQPESSVVFLCFGSLKSLAASQIKEIAQALELVGIRFLWSIRTDPKEYASPNEILPDGFMNRVMGLGLVCGWAPQVEILAHKAIGGFVSHCGWNSILESLRFGVPIATWPMYAEQQLNAFTIVKELGLALEMRLDYVSEYGEIVKADEIAGAVRSLMDGEDVPRRKLKEIAEAGKEAVMDGGSSFVAVKRFIDGL

SEQ ID NO: 201 - DNA, 1455 bp, A. thaliana
atgaatcgtgaagtgagcgaacgcattcacattctgttttttccgtttatggcacagggtcatatgattccgattctggatatggcaaaactgtttagccgtcgtggtgcaaaaagcaccctgctgaccacaccgattaatgcaaaaatctttgaaaaaccgatcgaggccttcaaaaatcagaatccggatctggaaattggcatcaagatttttaactttccgtgcgttgaactgggtctgccggaaggttgtgaaaatgcagattttatcaacagctaccagaaaagcgatagcggtgacctgtttctgaaatttctgttcagcaccaaatacatgaaacagcagctggaaagctttatcgaaaccaccaaaccgagcgcactggttgcagatatgtttttcccgtgggcaaccgaaagcgcagaaaaactgggtgttccgcgtctggtttttcatggcaccagcttttttagcctgtgttgcagctataatatgcgcattcataaaccgcataaaaaagttgcaaccagcagcaccccgtttgttattccgggtctgcctggtgatattgttattaccgaagatcaggcaaatgtggccaaagaagaaaccccgatgggcaaatttatgaaagaagttcgcgaaagcgaaaccaatagctttggtgttctggtgaacagcttttatgaactggaaagcgcatatgccgatttttatcgtagctttgttgcaaaacgtgcctggcatattggtccgctgagcctgagcaatcgcgaactgggtgaaaaagcgcgtcgcggtaaaaaagcaaatatcgatgaacaagaatgcctgaaatggctggatagcaaaacaccgggtagcgttgtttatctgagctttggtagcggcaccaattttaccaatgatcagctgctggaaatcgcatttggtctggaaggtagcggtcagagctttatttgggttgttcgcaaaaatgaaaaccagggcgataatgaagaatggctgcctgaaggttttaaagaacgtaccaccggtaaaggtctgattattcctggttgggcaccgcaggttctgatcctggatcacaaagcaattggtggctttgttacccattgtggttggaatagcgcaattgaaggtattgcagcaggtctgccgatggttacctggccgatgggtgcagaacagttttataacgaaaaactgctgacaaaagtgctgcgcattggtgttaatgttggtgcaaccgaactggtcaaaaaaggtaaactgattagtcgtgcccaggttgaaaaagcagttcgtgaagttattggtggcgaaaaagccgaagaacgtcgtctgtgggcaaaaaaacttggtgaaatggcaaaagcagcagttgaagaaggtggtagcagttataatgacgtgaacaagtttatggaagaactgaacggtcgcaaataa

SEQ ID NO: 202 - protein, 484 aa, A. thaliana
MNREVSERIHILFFPFMAQGHMIPILDMAKLFSRRGAKSTLLTTPINAKIFEKPIEAFKNQNPDLEIGIKIFNFPCVELGLPEGCENADFINSYQKSDSGDLFLKFLFSTKYMKQQLESFIETTKPSALVADMFFPWATESAEKLGVPRLVFHGTSFFSLCCSYNMRIHKPHKKVATSSTPFVIPGLPGDIVITEDQANVAKEETPMGKFMKEVRESETNSFGVLVNSFYELESAYADFYRSFVAKRAWHIGPLSLSNRELGEKARRGKKANIDEQECLKWLDSKTPGSVVYLSFGSGTNFTNDQLLEIAFGLEGSGQSFIWVVRKNENQGDNEEWLPEGFKERTTGKGLIIPGWAPQVLILDHKAIGGFVTHCGWNSAIEGIAAGLPMVTWPMGAEQFYNEKLLTKVLRIGVNVGATELVKKGKLISRAQVEKAVREVIGGEKAEERRLWAKKLGEMAKAAVEEGGSSYNDVNKFMEELNGRK

SEQ ID NO: 203 - DNA, 1458 bp, P. trichocarpa; identical to SEQ ID NO: 81

SEQ ID NO: 204 - protein, 485 aa, P. trichocarpa; identical to SEQ ID NO: 82

SEQ ID NO: 205 - DNA, 1431 bp, S. pennellii
atgacgatcccggaaaaaatcgaaaaaccgcatgttgcatttctgccgagtcctggtatgggtcatattacaccgctgtttgaatttgcaaaacgcctggttattcatcatggttttcacgtgagcttttttgtgattaccaccgcagcaagcgcagcacagaatgaactgtttcgtccggaaaatctgcctgccgattttaccgcagttgaaattccgcctgttgaaaacattagcagctttctgaccgatgatatgaaagttgttacccagctgtgtattatggttcgtgaaagcctgaaacatctgccgtcactgctgatgaaaaatcgtccgaaagcactgattattgacctgttttgtaccgatgcctttgagatttgtgaaaaactgagcattccggtgtatagcttttttaccgccagcaccattctgatggcatttagcctgtatctgccgacgctggatagcgaagttgaaggtgaatttgttgatctgaccgaaaccattcagacaccgggttgtagcccgatttatccgcatgatattctggatcaggtgaaagatcgtaagaacgaagagtataattggtatctgctgaatgttagccgtctgccgctggcagttggtatttttgttaatagctgggatgatctggaaccggttagcctgaaagccctgcgcgaaaacctgttttttcagaatattccgctgcctccggtttataccattggtccgctgattaaacaggatgaagttgtgaccgaaaaagatgcagaaattctggcatggctggatgatcagcctccggatagcgttctgtttgttgtttttggtagcggtggcaccctgaccagcgaacagctgaccgaactggcatggggtttagaaatgagccagcagcgttttattctggttgcacgtaaaccgagtgatgcaagcgccagcgcagccttttttaacgttggtagtgatgaaaatgatccgctgctgtacctgccggaaggttttgtgagccgtaccgaaggtcgtggtctggttgttccgagctgggcaccgcagacactgattctgaatcatcgtagtaccggtgcgtttctgagccattgtggttggaatagcaccctggaaagcgttaccaatggtgttccgattattgcatggcctctgtatgcagaacagcgtatgaatgcaacctttctggcagaagaagcaggcgttgcactgaaatttagcaaaaatccgggtgaagaactggtggatcgtaacgaaattgaaaaaaatgtgcgcattgtgatggaaggcgaaaaaggtaaagatatgcgtcgtcgtgcaaaagaactgaaagaaagcgcaaaaattgccctgaatagcggtggtagcagctatgaaagtctgtgtagcgttgttgaattttggaaaagccagtaa

SEQ ID NO: 206 - protein, 476 aa, S. pennellii
MTIPEKIEKPHVAFLPSPGMGHITPLFEFAKRLVIHHGFHVSFFVITTAASAAQNELFRPENLPADFTAVEIPPVENISSFLTDDMKVVTQLCIMVRESLKHLPSLLMKNRPKALIIDLFCTDAFEICEKLSIPVYSFFTASTILMAFSLYLPTLDSEVEGEFVDLTETIQTPGCSPIYPHDILDQVKDRKNEEYNWYLLNVSRLPLAVGIFVNSWDDLEPVSLKALRENLFFQNIPLPPVYTIGPLIKQDEVVTEKDAEILAWLDDQPPDSVLFVVFGSGGTLTSEQLTELAWGLEMSQQRFILVARKPSDASASAAFFNVGSDENDPLLYLPEGFVSRTEGRGLVVPSWAPQTLILNHRSTGAFLSHCGWNSTLESVTNGVPIIAWPLYAEQRMNATFLAEEAGVALKFSKNPGEELVDRNEIEKNVRIVMEGEKGKDMRRRAKELKESAKIALNSGGSSYESLCSVVEFWKSQ

SEQ ID NO: 207 - DNA, 1419 bp, S. indicum
atggatagcagctttagcaatctgcatgttgcaattctgagcagccctggtatgggtcatctgattccggttgttgttctggcaaatcgtctggcagcacatcataatgttcgtgttaccgttctgcaggttaccaccgcagttgcaccgcctgaaagcaaactgctgaacctgcatgttcataaagaactggttcagattattcagctgcctccggttgatattagccatctggttggtccgagcacacaggttgttacccagctgtgtctgatggttcgtgaagcactgccggttattcgtagcgcaattgatgcaatggatcgtcgtccggatgcactgtttgttgatcattttggcaccgatgcactgccgattgcagcagaactgaatattgccaaatatgtttatgttccgagcaccgcatggtttaccgcactgaccgtttattgtccggttctggatcaagaaattgaaggcgaatatgttgatcagctggaagatctgcgtattccgggttgtaaaccgattcgtccggaagatgttgttgaaccgatgctggatcgtaatgatcagcagtatgatgaatatgtgcgcatgggtaaacaaattccgctgagtgatggtattctgtttaattcctgggaagatcttgaaccgaaaaccattcaggcactgcgtgaaaatcagaccctgcgtagcattgttaatattccggtttatccgattggtccgctgcgtcgtccgattgaaccggcaggtccgaccagcgaactgattagctggctggatcgccagccgaatgaaagcgttctgtttgttagctttggtagcggtggtatgctgagcaccgagcagatgaccgaactggcatggggtttagaactgagctgtcagcgttttatttgggttgttcgtccgcctacacgtggtcgtatggatgatgcatatctgagcattcataacaccagtgatgataccccgacctatctgccggaaggttttagcacccgtacacgtgatgttggtctgctggttccgacctgggcaccgcaggttgaaattctgtcacatccggcagttggtggttttctgagccattgtggttggagcagcaccctggaaagcattaccaatggtgttccgatgattgcatggcctctgtatgcagaacagcgtatgaatgcaacctttctggttgaagaagttggcgttgcagttcgtccgggtgttctgccgaccaaacaggttgtgggtcgtgaagaaatcgaacgtctggcacgtagcctgattgaacacaaagaaggtcagcgtatgcgcgaaaaagcaaaacagctgaaactgagcggtatggatagcttaggtcatggtggtagcagctataaaagcatgtgcgaaatcctgagcaaaatcggctaa

SEQ ID NO: 208 - protein, 472 aa, S. indicum
MDSSFSNLHVAILSSPGMGHLIPVVVLANRLAAHHNVRVTVLQVTTAVAPPESKLLNLHVHKELVQIIQLPPVDISHLVGPSTQVVTQLCLMVREALPVIRSAIDAMDRRPDALFVDHFGTDALPIAAELNIAKYVYVPSTAWFTALTVYCPVLDQEIEGEYVDQLEDLRIPGCKPIRPEDVVEPMLDRNDQQYDEYVRMGKQIPLSDGILFNSWEDLEPKTIQALRENQTLRSIVNIPVYPIGPLRRPIEPAGPTSELISWLDRQPNESVLFVSFGSGGMLSTEQMTELAWGLELSCQRFIWVVRPPTRGRMDDAYLSIHNTSDDTPTYLPEGFSTRTRDVGLLVPTWAPQVEILSHPAVGGFLSHCGWSSTLESITNGVPMIAWPLYAEQRMNATFLVEEVGVAVRPGVLPTKQVVGREEIERLARSLIEHKEGQRMREKAKQLKLSGMDSLGHGGSSYKSMCEILSKIG

SEQ ID NO: 209 - DNA, 1428 bp, A. duranensis
atggcaaaaaccatgcgtattgccgttattaccagtccgggtctgacccatctggttccgattctggaatttagcaaacgttttctggaactgcatccgaattttcatgttacctgtatgattccgagcctgggtccgcatccggatagcaccaaaagctatctgcagaccctgccgagcaatattcatagcattctgctgcctccgattaacaaacaggatctgccgcagggtgcatatccgggtgttctgattcagaaaaccgttacactgagcctgccgagtattcgtgataccctgaaaagtctgaccctgcgtgaaccgctggcagcactgattgcagatgcatatgcctttgaagcactgagctttgccaaagaattcaactttctgagctatatctatttcccgagcagcgttatggccctgagcctgtgtctgcatctgccgaaactggatgaacaggttaccggtgaatataaagatctgaaagatccgatttatctgcctggttgtgttccggtttttggtcgtgatctgccgtttccgatgcagaatcgtagcagtgatgcatataaactgtatctggaacgcagcaaaggttttagcaatgtggatggctttatcatcaacagctttcttgaactggaaagcgcagcaatgaaagcactggcacgtgaaaaaagctgctttagcttttatgatgtgggtccgattacacagaaacgtagctcaagcaatgatggtgatgaagaactggaatgtctgcgttggctggataaacagccgcatagcagcgttctgtatgttagctttggtagcggtggcaccctgagccagagcgcaattaatgaactggcatttggcctggaactgagcggtcagcgttttctgtgggttctgcgtgcaccgagcgatagcagcagcgcagcatatctggataatcagaaaaatgaagatccgctgaaatttctgccgagcggtttcctggaacgtaccaaagaaaaaggtctggtgctgccgagctgggcaccgcaggttcagattctgagccatgatagcgttggtggttttctgtcacattgtggttggaatagcgttctggaaagtgttcaggttggtgttccgattattacctggcctctgtttgcagaacagcgtatgaatgcagttctgctggttgatggtctgaaagttgcagttcgtccgaatgttggtgaagatggtgttgttggtaaagaagaagttagcaacgttatcaagtgcctgatggaacaagaagagggtaaagcaatgcgtaaacgtatggaagatttaaaagcatatgcagccgatgccgttaataaagatgcaggtagcagcacccatgcactgagccatctggcaaccaaatgggaaaactttagcggtattgaggacaacaactaa

SEQ ID NO: 210 - protein, 475 aa, A. duranensis
MAKTMRIAVITSPGLTHLVPILEFSKRFLELHPNFHVTCMIPSLGPHPDSTKSYLQTLPSNIHSILLPPINKQDLPQGAYPGVLIQKTVTLSLPSIRDTLKSLTLREPLAALIADAYAFEALSFAKEFNFLSYIYFPSSVMALSLCLHLPKLDEQVTGEYKDLKDPIYLPGCVPVFGRDLPFPMQNRSSDAYKLYLERSKGFSNVDGFIINSFLELESAAMKALAREKSCFSFYDVGPITQKRSSSNDGDEELECLRWLDKQPHSSVLYVSFGSGGTLSQSAINELAFGLELSGQRFLWVLRAPSDSSSAAYLDNQKNEDPLKFLPSGFLERTKEKGLVLPSWAPQVQILSHDSVGGFLSHCGWNSVLESVQVGVPIITWPLFAEQRMNAVLLVDGLKVAVRPNVGEDGVVGKEEVSNVIKCLMEQEEGKAMRKRMEDLKAYAADAVNKDAGSSTHALSHLATKWENFSGIEDNN

SEQ ID NO: 211 - DNA, 1476 bp, Z. jujube
atgaaaaaagccgaactggtgtttattccgattcctggtcgtggtcatctgctgagcatggttgaatttgcaaaactgctggttgcacgtgatccgcatctgtatgttaccattctgattatgaaactgccgttcgataccaaagttggtgcatataccgcaagcctggttagcagcagcagtaatcgtattaattgtattgatctgccgatcaacgagaaagtgtataccgaaagcaatccgcctgtttttatgaccagctttatcgaagatcagaaaccgcatgttaaaaatgcagttacccagctgattcagagccgtgatgttgatgatgaagatagtccgcgtctggcaggttttgttattgatatgttttgcaccaccatgatcgatgtggcaaatgaatttggtattccgacctatgttttttttgcaagcggtgcaggttttctgggtctgctgtttcatctgcagcatctgagcgataatcataacgtgaacatcaccgaatttgagaatgatccggaagcagaactggttattccgagctttgttaatccgtttccgagcaaagttctgccggttctggttctggataaagatggtggtccggttatgatgaatcatgcacgtcgtattcgtgaaaccaaaggcattattgtgaacacctttattgaactggaaagccatgcagtttatagcctgagcaatggtgatcatgaatttccgccagtttatccggttggtccgattctgtatctgaaaagtgatgaaagtcatgtgggtagcgttaatcagattcagaacagcgatattattcgctggctggataatcagcctccgagcagcgttgtttttgtttgttttggtagcatgggtagctttagtgaggatcaggttaaagaaattgcctatggtctggaacagagcggtcagcgttttatttggagcctgcgtccgcctccgcctaaagataaaatgggttttccgagcgattatctggatccgaccgttgtgctgccggaaggctttctggatcgtaccgcagaagttggtaaagttattggttgggcaccgcaggttgaaattctgagccattgtgcaaccggtggttttgtttcacattgtggttggaatagcaccctggaaagtctgtggtttggtgttccgattgcaacctggccgatttttgcagaacagcagctgaatgcatttcagatggtgaaagaatttggttgtgccgtggaaatcaaactggattatcgtcgtgaatttaacagcgacggtgatgatcaggcagttgttagcgcacaagaaattgaacgtggtattcgtcgtgttatggatgatgatagcgatattcgtaaacgcaccaaagaaattagcgaacagagccgtcgtaccctggttgatggtggtacaagctttagctgtctgggtcatctgatcaatgatattctggaaaacgtgagctaa

SEQ ID NO: 212 - protein, 491 aa, Z. jujube
MKKAELVFIPIPGRGHLLSMVEFAKLLVARDPHLYVTILIMKLPFDTKVGAYTASLVSSSSNRINCIDLPINEKVYTESNPPVFMTSFIEDQKPHVKNAVTQLIQSRDVDDEDSPRLAGFVIDMFCTTMIDVANEFGIPTYVFFASGAGFLGLLFHLQHLSDNHNVNITEFENDPEAELVIPSFVNPFPSKVLPVLVLDKDGGPVMMNHARRIRETKGIIVNTFIELESHAVYSLSNGDHEFPPVYPVGPILYLKSDESHVGSVNQIQNSDIIRWLDNQPPSSVVFVCFGSMGSFSEDQVKEIAYGLEQSGQRFIWSLRPPPPKDKMGFPSDYLDPTVVLPEGFLDRTAEVGKVIGWAPQVEILSHCATGGFVSHCGWNSTLESLWFGVPIATWPIFAEQQLNAFQMVKEFGCAVEIKLDYRREFNSDGDDQAVVSAQEIERGIRRVMDDDSDIRKRTKEISEQSRRTLVDGGTSFSCLGHLINDILENVS

SEQ ID NO: 213 - DNA, 1389 bp, O. sativa
atggatagcggttatagcagcagctatgcagcagcagccggtatgcatgttgttatttgtccgtggctggcatttggtcatctgctgccgtgtctggatctggcacagcgtctggcaagccgtggtcatcgtgttagctttgttagcacaccgcgtaatattagccgtctgcctccggttcgtccggcactggcaccgctggttgcatttgttgcactgccgctgcctcgtgttgaaggtctgccggatggtgcagaaagcaccaatgatgttccgcatgatcgtccggatatggttgaactgcatcgtcgtgcatttgatggtctggcagcaccgtttagcgaatttctgggcaccgcatgtgcagattgggttattgttgatgtttttcatcattgggcagccgcagcagcactggaacataaagttccgtgtgcaatgatgctgctgggtagcgcacatatgattgcaagcattgcagatcgtcgtctggaacgtgcagaaaccgaaagtcctgcggcagcaggtcagggtcgtcctgcagccgcaccgacctttgaagttgcacgtatgaaactgattcgtaccaaaggtagcagcggtatgagcctggcagaacgttttagtctgaccctgagccgtagcagcctggttgttggtcgtagctgtgttgaatttgaaccggaaaccgttccgctgctgagcaccctgcgtggtaaaccgattacctttctgggtctgatgcctccgctgcatgaaggtcgtcgcgaagatggtgaagatgcaaccgttcgttggctggatgcacagcctgcaaaaagcgttgtttatgttgccctgggtagtgaagttccgctgggtgttgaaaaagtgcatgaactggcactgggtttagaactggcaggcacccgttttctgtgggcactgcgtaaaccgaccggtgttagtgatgccgatctgcttccggcaggttttgaagaacgtacccgtggtcgtggtgttgttgcaacccgttgggttccgcagatgagcattctggcacatgcagcagtgggtgcatttctgacccattgtggttggaatagcaccattgaaggcctgatgtttggccatccgctgattatgctgccgatttttggtgatcagggtccgaatgcacgtctgattgaagcaaaaaatgcaggtctgcaggttgcccgtaatgatggtgatggtagctttgatcgtgaaggtgttgcagcagccattcgtgcagttgcagttgaagaagaaagcagcaaagtttttcaggccaaagccaaaaaactgcaagaaattgttgcagatatggcctgccatgaacgttatattgatggttttattcagcagctgcgtagctacaaagattaa

SEQ ID NO: 214 - protein, 462 aa, O. sativa
MDSGYSSSYAAAAGMHVVICPWLAFGHLLPCLDLAQRLASRGHRVSFVSTPRNISRLPPVRPALAPLVAFVALPLPRVEGLPDGAESTNDVPHDRPDMVELHRRAFDGLAAPFSEFLGTACADWVIVDVFHHWAAAAALEHKVPCAMMLLGSAHMIASIADRRLERAETESPAAAGQGRPAAAPTFEVARMKLIRTKGSSGMSLAERFSLTLSRSSLVVGRSCVEFEPETVPLLSTLRGKPITFLGLMPPLHEGRREDGEDATVRWLDAQPAKSVVYVALGSEVPLGVEKVHELALGLELAGTRFLWALRKPTGVSDADLLPAGFEERTRGRGVVATRWVPQMSILAHAAVGAFLTHCGWNSTIEGLMFGHPLIMLPIFGDQGPNARLIEAKNAGLQVARNDGDGSFDREGVAAAIRAVAVEEESSKVFQAKAKKLQEIVADMACHERYIDGFIQQLRSYKD

SEQ ID NO: 215 - DNA, 1377 bp, T. cacao
atggaaagcaaagttgatcagccgcatgttattgttctgccgtatccggcacagggtcatattaatccgatgtttcagtttagcaaacgtctggcaagcaaaggttttaaagcaaccctggcaattaccgtgtttattagcaataccatgaaactggaaagcagcggtagcgttcagattgataccattagtgatggttatgatgccggtggtctggccagcagcggtggtattcagcattatctgcctcgtctggaagccattggtagcaaaaccctggccgaactgattatcaaacataaacgtaccagccgtccgattgattgcattatctatgatgcagcaatgccgtgggcattagatgttgcaaaacagtatggtctgcatggtgcagcattttttacccagatgtgtgcagtgaactacatctattataacgtgcatcacaaactgctgaatctgccgatttgtagcaccccgattagcattccgggtctgccgctgctgcagcctggtgatctgccgagctttgtttgtagcagcgaaggtagctatattgcatatctgggtcgtgttctgaaccagttcaaaaacattgataaagccgacttcatcctgatcaacaccttctataagctggaaaatgaagccgttgaaagcatgagcaaagtttatccggttctgaccattggtccgaccgttccgagcatttatctggataaaccggttgaaaacgataaagcatatggtctggacctgtttgattttaacagcagcaccagcaccgattggctgagcaccaaaccgcctggtagcgttatttatgttagctttggtagcgtgaccagcattagcagcaaacaaatggaagaaattgcacgcggtctgaataacagcaacttttatttcctgtgggttgttcgtgcaagcgaagaagcaaaactgccgaaaggctttaaagaagaatcaggcgaaaaaggcctgattgttaattggagtccgcagctggatgttctgagcaatgaagcagttggttgcttttttacacattgcggttggaatagcaccaccgaagcactgagcctgggtgttccgatggttgcaatgccgcagtggaccgatcagccgaccgttggcaaatatatcgaagatgtttggaaagttggtgtgcgcgtgaaaattgatgatgttagcggtattgtgaaccgcgaagaaatcgaaagctgtattcgtcaggttatggaaggtgaacgtggcaaagaaattaaagaaaacgccaaaaaatggcgtgaactggcactggaagcggttggtgaaggtggcaccagcgatcgtaatattgatgaatttatgagcaaactgcgtcgcaccgcataa

SEQ ID NO: 216 - protein, 458 aa, T. cacao
MESKVDQPHVIVLPYPAQGHINPMFQFSKRLASKGFKATLAITVFISNTMKLESSGSVQIDTISDGYDAGGLASSGGIQHYLPRLEAIGSKTLAELIIKHKRTSRPIDCIIYDAAMPWALDVAKQYGLHGAAFFTQMCAVNYIYYNVHHKLLNLPICSTPISIPGLPLLQPGDLPSFVCSSEGSYIAYLGRVLNQFKNIDKADFILINTFYKLENEAVESMSKVYPVLTIGPTVPSIYLDKPVENDKAYGLDLFDFNSSTSTDWLSTKPPGSVIYVSFGSVTSISSKQMEEIARGLNNSNFYFLWVVRASEEAKLPKGFKEESGEKGLIVNWSPQLDVLSNEAVGCFFTHCGWNSTTEALSLGVPMVAMPQWTDQPTVGKYIEDVWKVGVRVKIDDVSGIVNREEIESCIRQVMEGERGKEIKENAKKWRELALEAVGEGGTSDRNIDEFMSKLRRTA

SEQ ID NO: 217 - DNA, 1488 bp, A. thaliana
atggttagcgaaaccaccaaaagcagtccgctgcattttgttctgtttccgtttatggcacagggtcatatgattccgatggttgatattgcacgtctgctggcacagcgtggtgtgattattaccattgttaccacaccgcataatgcagcacgctttaaaaacgttctgaatcgtgcaattgaaagcggtctgccgattaatctggttcaggttaaatttccgtatctggaagcaggtctgcaagaaggtcaagaaaatattgatagcctggataccatggaacgcatgattccgtttttcaaagccgtgaattttctggaagaaccggtgcagaaactgatcgaagaaatgaatccgcgtccgagctgtctgattagcgatttttgtctgccgtataccagcaaaatcgccaaaaaattcaacatcccgaaaatcctgtttcatggtatgggttgtttttgcctgctgtgtatgcatgttctgcgtaaaaatcgtgaaatcctggataacctgaaaagcgataaagaactgtttaccgttccggattttccggatcgtgtggaatttacccgtacacaggttccggttgaaacctatgttccggcaggcgattggaaagatatttttgatggtatggtggaagccaacgaaaccagctatggtgttattgtgaatagctttcaagaactggaaccggcatatgcgaaagattacaaagaagttcgtagcggtaaagcatggaccattggtccggttagcctgtgtaataaagttggtgcagataaagcagaacgcggtaataaaagtgatatcgatcaggatgaatgcctgaaatggctggatagcaaaaaacatggtagcgttctgtatgtttgtctgggtagcatttgcaatctgccgctgagccagctgaaagaattaggtctgggtttagaagaaagccagcgtccgtttatttgggttattcgtggttgggagaaatacaaagaactggttgaatggttttccgaaagcggttttgaagatcgtattcaggatcgtggcctgctgattaaaggttggagtccgcagatgctgattctgagccatccgagcgttggtggctttctgacccattgtggttggaatagcaccctggaaggtattacagctggcctgccgctgctgacctggcctctgtttgcagatcagttttgtaatgaaaaactggtggtggaagttctgaaagccggtgtgcgtagcggtgttgaacagccgatgaaatggggtgaagaagaaaaaattggcgtcctggttgataaagaaggtgttaaaaaagccgtggaagaactgatgggtgaaagtgatgatgcaaaagaacgtcgtcgtcgtgcaaaagagctgggcgatagcgcacataaagcagttgaagaaggtggtagcagccatagcaatattagctttctgctgcaggatattatggaactggcagaaccgaataactaa

SEQ ID NO: 218 - protein, 495 aa, A. thaliana
MVSETTKSSPLHFVLFPFMAQGHMIPMVDIARLLAQRGVIITIVTTPHNAARFKNVLNRAIESGLPINLVQVKFPYLEAGLQEGQENIDSLDTMERMIPFFKAVNFLEEPVQKLIEEMNPRPSCLISDFCLPYTSKIAKKFNIPKILFHGMGCFCLLCMHVLRKNREILDNLKSDKELFTVPDFPDRVEFTRTQVPVETYVPAGDWKDIFDGMVEANETSYGVIVNSFQELEPAYAKDYKEVRSGKAWTIGPVSLCNKVGADKAERGNKSDIDQDECLKWLDSKKHGSVLYVCLGSICNLPLSQLKELGLGLEESQRPFIWVIRGWEKYKELVEWFSESGFEDRIQDRGLLIKGWSPQMLILSHPSVGGFLTHCGWNSTLEGITAGLPLLTWPLFADQFCNEKLVVEVLKAGVRSGVEQPMKWGEEEKIGVLVDKEGVKKAVEELMGESDDAKERRRRAKELGDSAHKAVEEGGSSHSNISFLLQDIMELAEPNN

SEQ ID NO: 219 - DNA, 1356 bp, A. thaliana
atggaagaaaaaccggcaggtcgtcgtgttgttctggttgcagttccggcacagggtcatattagcccgattatgcagctggcaaaaaccctgcatctgaaaggttttagcattaccattgcgcagaccaagtttaactattttagcccgagtgatgatttcaccgattttcagtttgttaccattccggaaagcctgccggaaagcgattttgaagatctgggtccgattgaatttctgcacaagctgaataaagaatgccaggtgagctttaaagattgtctgggtcagctgctgctgcaacagggtaatgaaattgcatgtgttgtgtatgacgaatttatgtattttgcagaagccgcagccaaagaatttaaactgccgaatgtgatttttagcaccaccagtgcaaccgcatttgtttgtcgtagcgcatttgataaactgtacgcaaatagcattctgacaccgctgaaagaaccgaaaggtcagcagaatgaactggttccggaatttcatccgctgcgttgtaaagattttccggttagccattgggcaagcctggaaagcatgatggaactgtatcgtaataccgtggataaacgtaccgcaagcagcgttattatcaataccgccagctgtctggaaagctcaagcctgagccgtctgcagcaacaactgcagattccggtttatccgattggtccgctgcatctggttgccagcgcaagcaccagcctgctggaagagaataaaagctgtattgaatggctgaacaagcagaagaagaacagcgttatctttgttagcctgggtagcctggcactgatggaaattaatgaagttattgaaaccgccttaggtctggatagcagcaaacagcagtttctgtgggttattcgtccgggtagcgttcgtggtagcgaatggattgaaaatctgccgaaagaattcagcaaaattatcagcggtcgtggctatattgttaaatgggctccgcagaaagaagttctgagccatccggcagttggtggtttttggagccattgtggttggaatagcaccctggaaagtattggtgaaggtgttccgatgatttgtaaaccgtttagcagcgatcagatggttaatgcacgttatctggaatgcgtttggaaaattggtattcaggttgaaggtgatctggatcgtggtgcagttgaacgtgcagttcgtcgtctgatggttgaagaggaaggtgaaggtatgcgtaaacgtgcaattagcttaaaagaacagctgcgtgcaagcgtgattagcggtggtagcagccataatagcctggaagaatttgttcattatatgcgcaccctgtaa

SEQ ID NO: 220 - protein, 451 aa, A. thaliana
MEEKPAGRRVVLVAVPAQGHISPIMQLAKTLHLKGFSITIAQTKFNYFSPSDDFTDFQFVTIPESLPESDFEDLGPIEFLHKLNKECQVSFKDCLGQLLLQQGNEIACVVYDEFMYFAEAAAKEFKLPNVIFSTTSATAFVCRSAFDKLYANSILTPLKEPKGQQNELVPEFHPLRCKDFPVSHWASLESMMELYRNTVDKRTASSVIINTASCLESSSLSRLQQQLQIPVYPIGPLHLVASASTSLLEENKSCIEWLNKQKKNSVIFVSLGSLALMEINEVIETALGLDSSKQQFLWVIRPGSVRGSEWIENLPKEFSKIISGRGYIVKWAPQKEVLSHPAVGGFWSHCGWNSTLESIGEGVPMICKPFSSDQMVNARYLECVWKIGIQVEGDLDRGAVERAVRRLMVEEEGEGMRKRAISLKEQLRASVISGGSSHNSLEEFVHYMRTL

SEQ ID NO: 221 - DNA, 1464 bp, C. roseus
atggtgaaccagctgcacatttttaactttccgtttatggcacagggtcatatgctgcctgcactggatatggcaaacctgtttaccagccgtggtgttaaagttaccctgattaccacacatcagcatgttccgatgtttaccaaaagcattgaacgtagccgtaatagcggttttgatattagcattcagagcatcaaatttccggcaagcgaagttggtctgccggaaggtattgaaagcctggatcaggttagcggtgatgatgaaatgctgccgaaatttatgcgtggtgtgaatctgctgcaacagccgctggaacagctgctgcaagaaagccgtccgcattgtctgctgagcgatatgttttttccgtggaccaccgaaagcgcagcaaaatttggtattccgcgtctgctgtttcatggtagctgtagctttgcactgagcgcagcagaaagcgttcgtcgtaataaaccgtttgaaaatgttagcaccgataccgaagaatttgttgttccggatctgccgcatcagattaaactgacccgtacacagattagcacctatgaacgtgaaaacatcgaaagcgatttcaccaagatgctgaaaaaagttcgtgatagcgaaagcaccagctatggtgttgttgtgaatagcttttatgaactggaaccggattatgccgattactatattaacgttctgggtcgtaaagcctggcatattggtccgtttctgctgtgtaataaactgcaggccgaagataaagcacagcgtggtaaaaaaagcgcaattgatgcagatgaatgtctgaattggctggatagcaaacagccgaatagcgttatttatctgtgttttggtagcatggccaatctgaatagcgcacagctgcatgaaattgcaaccgcactggaaagcagcggtcagaactttatttgggttgttcgtaaatgcgtggatgaagaaaatagcagcaaatggtttccggaaggctttgaagaacgtaccaaagaaaaaggcctgattatcaaaggttgggcaccgcagacactgattctggaacatgaaagcgttggtgcatttgttacccattgtggttggaatagcaccctggaaggcatttgtgccggtgttccgctggttacctggccgttttttgcagaacagttttttaacgagaaactgatcacggaagttctgaaaaccggttatggtgtgggtgcacgtcagtggtcacgtgtgagcaccgaaatcattaaaggtgaagcaattgccaatgccattaatcgtgttatggttggtgatgaagcagtggaaatgcgtaatcgtgcaaaagatctgaaagagaaagcacgtaaagcactggaagaagatggtagcagctatcgtgatctgaccgcactgattgaagaactgggtgcatatcgtagccaggttgaacgtaaacagcaggattaa

SEQ ID NO: 222 - protein, 487 aa, C. roseus
MVNQLHIFNFPFMAQGHMLPALDMANLFTSRGVKVTLITTHQHVPMFTKSIERSRNSGFDISIQSIKFPASEVGLPEGIESLDQVSGDDEMLPKFMRGVNLLQQPLEQLLQESRPHCLLSDMFFPWTTESAAKFGIPRLLFHGSCSFALSAAESVRRNKPFENVSTDTEEFVVPDLPHQIKLTRTQISTYERENIESDFTKMLKKVRDSESTSYGVVVNSFYELEPDYADYYINVLGRKAWHIGPFLLCNKLQAEDKAQRGKKSAIDADECLNWLDSKQPNSVIYLCFGSMANLNSAQLHEIATALESSGQNFIWVVRKCVDEENSSKWFPEGFEERTKEKGLIIKGWAPQTLILEHESVGAFVTHCGWNSTLEGICAGVPLVTWPFFAEQFFNEKLITEVLKTGYGVGARQWSRVSTEIIKGEAIANAINRVMVGDEAVEMRNRAKDLKEKARKALEEDGSSYRDLTALIEELGAYRSQVERKQQD

SEQ ID NO: 223 - DNA, 1458 bp, E. grandis
atggatccgagtccgctggaaagccgtaatagccgtgcactggcacatgcagtttgtgttccgtttccggcacagggtcatattaatccgatgatgcagctggcaaaactgctgcatgcacgtggtatttttgttacctttgtgaacaccgaatttaaccatcgtcgtctgctgcgtagccgtggtgcagaaagcctgcaggatctggaaaacttttgttttgaaaccattccggatggtctgcctccgagcgatagcaatgcaacccaggatgttccggcactgtgtgatagcattcagaaaaattgtctgggtccgtttaaaaagctgctggcacgtattaaaagtgatgaagttgttccgcctgttacctgcgttattagtgatggtgcaatgggttttgcaagcgaagcagcaaaagaactgggtgttccggaagttcagttttggaccgcaagcgcatgtggttttatgggttatctgcagtatcgtgaactggttaaacgcggtattgtgccgtttaaagatgaagattttctgagcaatggcaccctggatgatcctgttgattggattccgggtatgcgtaatattcgtctgcgtgatattccgagctttatgcgtaccaccaatctgaatgatatcctgttcaactatctgcaagaagaagttcagcattgtctgaaaagcagcgccattctgtttaacacctttaacgaactggaacacgaagtgctggaaaaaattgcagatattagtccgcgtatttattgtgcaggtccgctgagcctgctgctgcaggatattccgtcaagtccggttaaaagctttcgtagcagcctgtggaaagaagattatagctgtctggaatggctggatcagcgtgaagcagaaagcgttgtttatgttaattatggcagcattaccgtgatgaccgaagaacatctgaaagaatttgcatggggtcttgccaatagcaaacatccgtttctgtgggttattcgtccggatgttgttcagggtgatagcgcaattctgccaccggaatttctggaagaagttaaagatcgcggttttctgaccagttggtgtccgcaggatcaggttctgagccatcgtagcgttggtgcatttctgacccattgtggttggaatagtaccctggaaggtatttgtggtggtgttccgctgatttgttggccgttttttgcagaacagcagaccaattgtcgttatgcatgtaccgaatggggtaatggtatggaagttaatcaggatgtgcgtcgcgaagaaattgaagcactggttggtgaagttatggaaggtgttcgtggcaaaaaaatgcgtgaaaatgccaaaaaatggaaagagggtgcagttgaagcaaccggtcgtcagggtccgagctataatgattttaatcgctttatcaaagaagtgtttcgcctgaacgattaa

SEQ ID NO: 224 - protein, 485 aa, E. grandis
MDPSPLESRNSRALAHAVCVPFPAQGHINPMMQLAKLLHARGIFVTFVNTEFNHRRLLRSRGAESLQDLENFCFETIPDGLPPSDSNATQDVPALCDSIQKNCLGPFKKLLARIKSDEVVPPVTCVISDGAMGFASEAAKELGVPEVQFWTASACGFMGYLQYRELVKRGIVPFKDEDFLSNGTLDDPVDWIPGMRNIRLRDIPSFMRTTNLNDILFNYLQEEVQHCLKSSAILFNTFNELEHEVLEKIADISPRIYCAGPLSLLLQDIPSSPVKSFRSSLWKEDYSCLEWLDQREAESVVYVNYGSITVMTEEHLKEFAWGLANSKHPFLWVIRPDVVQGDSAILPPEFLEEVKDRGFLTSWCPQDQVLSHRSVGAFLTHCGWNSTLEGICGGVPLICWPFFAEQQTNCRYACTEWGNGMEVNQDVRREEIEALVGEVMEGVRGKKMRENAKKWKEGAVEATGRQGPSYNDFNRFIKEVFRLND

SEQ ID NO: 225 - DNA, 1437 bp, S. indicum
atgggtagcctgcctcgtccggaaagcaaaccgcatgcagtgtgtattccgtatccggcacagggtcatgttaatccgatgctgaaactggcaaaactgctgcatcatcatggtggttttcatatcacctttgtgaacaccgaatataaccatcgtcgtctgattaaaagcggtggtccgagcgcagttgaaggtctgagcgattttcgttttcataccattccggatggtctgcctccgagtgatgcagataccacacaggatgttccgagcctgtgtgttagtaccaccaccacctgtctggaaccgttttgtgatctgctgagcaaactgaatagcgaagcaccgcctgttagctgtattgttagtgatggtgttatgagctttaccctgaaagcagcagaacgttttggtctgccggaagttctgttttggaccaccagtgcatgtggttttctgggttatcgtcagtatcgtcgcctggttgaagaaggtcatacaccgctgcgtgatatgagccaggttaccaatggtcattttgaaaccgttattgattgggtgccaggcatgaaagatattcgtctgcgtgattttccgagctttattcgtaccaccgatccgaaagatatcatgctgaattttctgatccaagaagccgaagcagcaccgcgtgcaaaagcactgattattaacacctttgatgcactggaacgtgatgttctggatgcactgagcgcaagctttccgcgtatttataccgttggtccgctgcagctgatgatggatcatgttcaggatgaacgtctgggtgcaatggcaagcagcctgtggaaagaagatctgagttgtatggaatggctggataccaaagaaccggaaagcgttgtttatgtgaattttggtagcattaccgtgatgaccgcagatcagatgagcgaatttgcatggggtttagccaatagcaaaaaaccgtttctgtgggttattcgtccggatctggttgccggtgataaagcaatgctgcctccggaatttgttaccgaaaccaaagatcgtagccgtctgatgagctggtgtccgcaagaacaggttctgaaacatccggcagttggtggctttctgacccatagcggttggaatagcaccattgaaagcattgttggtggtgttccggttatttgttggccgttttttgcagaacagcagaccaattgtcgttttagctgtgttgaatggggtatgggtatggaaattgacaataatgtgaaacgcggtgaagttgaagcactggttaaagaactgatggatggtgagaaaggcaagaaaatgaaagaaaaagccctggaatggaaacgcaaagcagaagaggcagcagcacctggtggtagcagctatctgaatctggaaaatctgattaatgaactgctgctgcagtaa

SEQ ID NO: 226 - protein, 478 aa, S. indicum
MGSLPRPESKPHAVCIPYPAQGHVNPMLKLAKLLHHHGGFHITFVNTEYNHRRLIKSGGPSAVEGLSDFRFHTIPDGLPPSDADTTQDVPSLCVSTTTTCLEPFCDLLSKLNSEAPPVSCIVSDGVMSFTLKAAERFGLPEVLFWTTSACGFLGYRQYRRLVEEGHTPLRDMSQVTNGHFETVIDWVPGMKDIRLRDFPSFIRTTDPKDIMLNFLIQEAEAAPRAKALIINTFDALERDVLDALSASFPRIYTVGPLQLMMDHVQDERLGAMASSLWKEDLSCMEWLDTKEPESVVYVNFGSITVMTADQMSEFAWGLANSKKPFLWVIRPDLVAGDKAMLPPEFVTETKDRSRLMSWCPQEQVLKHPAVGGFLTHSGWNSTIESIVGGVPVICWPFFAEQQTNCRFSCVEWGMGMEIDNNVKRGEVEALVKELMDGEKGKKMKEKALEWKRKAEEAAAPGGSSYLNLENLINELLLQ

SEQ ID NO: 227 - DNA, 1443 bp, C. sativus; identical to SEQ ID NO: 79

SEQ ID NO: 228 - protein, 480 aa, C. sativus; identical to SEQ ID NO: 80

SEQ ID NO: 229 - DNA, 1395 bp, H. annuus
atgctgaagatcatggaagtggaaaaaaagtatgaaggtcatgttgttgttctgccgtatccgagccagggtcatattaatccgctgctgcagtttgcaaaacgtctggcaagcaaaggtctgaaagcaaccattgcaaccacacattataccctgagcagcattaccagtccgctggttaccgttgaaccgattagtgatggttttgatgatggtggttttgcacaggttcgtagcgaagaactgtttctggaaagctttaaaaccaatggtagccgtacactgacccagctgatcaaaaaacatcaggcaaccaaaaatccgattacctgcgttgtttatgatagctttctgccgtgggcattagatgttgcaaaagaaaatggtattcttggcggtccgttttttaccaatagcgcagcagttaccgcaatttttagccgtattcatggtggtgaactgaaactgccgctgcgtctggaagattgtccggttgttattccgggtgttccgcctatgaacctggaagatctgccgagctttctgaatgcaccggaaagttatccggcatatctgcgtatgaaactgaaccagtttagcaatctggataaagccgattggattttcagcaatacctttcagagcctggaacatgaagttgttaaaggtatgggtaaacagtggcctgcaaaactgattggtccgatggttccgagcgcatatctggatggtcgtattgaaggtgataaaggttatggtgcaagcctgtggaaaccgctggatgaagattgtgcaaaatggctggaaaccaaaccgagcaatagcgttgtgtatatttcatttggtagcatggttagcctgacgcagcaagaaatggaagaaattgcatggggtctgcaggatagcggttgctattttctgtgggttgtgaaagatagcgaacgtcataaactgccgaaagcatttctggatctgaccacacagaatcaagaaaaaggtatgattgtgagctggtgcaatcagctggaaatgctggcacatgatagcgttggttgttttctgacccattgtggttggaatagcaccctggaaggtctgagcctgggtgtgccgatggttggtgttccgaaatgggcagatcagctgaccgatgccaaatttatcaaagatgtttggtgtgttggtgtgcgtgtgaaagttgataatgttaccggtatggttaatcgtgaagaggttgttctgtgtctgaatgaagttatggatgaaggtaaacgcagcctggaaatcaaaaaaaacgcaggcaaatggaaagaactggccaaagaagcaattagcgaaggcggtagcagcgatcgtgcaattgatgaatttgttatgagcctgaaaggcacctaa

SEQ ID NO: 230 - protein, 464 aa, H. annuus
MLKIMEVEKKYEGHVVVLPYPSQGHINPLLQFAKRLASKGLKATIATTHYTLSSITSPLVTVEPISDGFDDGGFAQVRSEELFLESFKTNGSRTLTQLIKKHQATKNPITCVVYDSFLPWALDVAKENGILGGPFFTNSAAVTAIFSRIHGGELKLPLRLEDCPVVIPGVPPMNLEDLPSFLNAPESYPAYLRMKLNQFSNLDKADWIFSNTFQSLEHEVVKGMGKQWPAKLIGPMVPSAYLDGRIEGDKGYGASLWKPLDEDCAKWLETKPSNSVVYISFGSMVSLTQQEMEEIAWGLQDSGCYFLWVVKDSERHKLPKAFLDLTTQNQEKGMIVSWCNQLEMLAHDSVGCFLTHCGWNSTLEGLSLGVPMVGVPKWADQLTDAKFIKDVWCVGVRVKVDNVTGMVNREEVVLCLNEVMDEGKRSLEIKKNAGKWKELAKEAISEGGSSDRAIDEFVMSLKGT

SEQ ID NO: 231 - DNA, 1368 bp, H. annuus
atggaacagggtgaaatggcagaacatggtggtcgtcgtccgcgtctggttctgaccgcaagtccgctgcagggccatatgaccccgatgctgcatctggcaacctttctgcatagcaaaggttttagcattaccattgcacatagcgaactgaatcgtccggatccgagcaatcatccggcatttacatttctgccgctgctggatcatctgagcgttacaccgggttttgcaaatgcagttcagtttctgcaggcactgaatgataattgtcgtcagcattttcaagaacacctggtgcagattattaacgcacagaaagatgcaagccagaaagaaagcattgtgatcatctatgacaacctgatgtattttgcaggtagcgttgccggtgatctgggtctgccgagcattattctgcgtaccagcagcgcaagcacctttccggcaatcaaaattatcccgcagctgcatcaagaaggtcgtctgccggttcaggatagcatgctgcaagaaattgtgagcgaactgcatccgctgcgttataaagatctgccgtttattagcctgccgattcagcagaccctggaactggttaatatgattatgccgaaaacaccgcctagcgcatatatgtggaataccctggaatttctggaaccgagcgcactgacccagattcgtaataactatcatgttccgatttttaccgttggaccgctgcacaaaattagcccgacaccgagcagcaccagctttctgaaagaagatagcagctgtattagctggctggataaacaggcaagcaaaagcgttatgtatgttagcctgggtagcctggcaaaagcagatgataaagttattaccgaaatggcatggggtcttgcaaatagcaatcagccgtttctgtgggttgttcgtccggcaagcattaaaggttttgaatggattgaattcctgccggaaggtctggtgaccgaaatgaaagaacgtggtctgattgttaaatgggcaccgcagaaagaagttctggcacattttgcaattggtggtttttggagccattgtggttggaatagcaccctggaaagcctgagcgaaggtgttccgatgctgtgtcatccgtttgatgcagatcagaaagttaatagccgttatctgagtgacgtttggaaaatgggttttgaaattgttgtggaacgcggtgaaattgaaggtgcaattcgtcgtctgctggtgagcaaagaaggtgaagaaatgaaacagcgtgcactggaaattcaagagaaagtgaaagttggtgtttgtcatggtggtagcagccataatagcctgaaagagctggttgattttatcctgagcctgtaa

SEQ ID NO: 232 - protein, 455 aa, H. annuus
MEQGEMAEHGGRRPRLVLTASPLQGHMTPMLHLATFLHSKGFSITIAHSELNRPDPSNHPAFTFLPLLDHLSVTPGFANAVQFLQALNDNCRQHFQEHLVQIINAQKDASQKESIVIIYDNLMYFAGSVAGDLGLPSIILRTSSASTFPAIKIIPQLHQEGRLPVQDSMLQEIVSELHPLRYKDLPFISLPIQQTLELVNMIMPKTPPSAYMWNTLEFLEPSALTQIRNNYHVPIFTVGPLHKISPTPSSTSFLKEDSSCISWLDKQASKSVMYVSLGSLAKADDKVITEMAWGLANSNQPFLWVVRPASIKGFEWIEFLPEGLVTEMKERGLIVKWAPQKEVLAHFAIGGFWSHCGWNSTLESLSEGVPMLCHPFDADQKVNSRYLSDVWKMGFEIVVERGEIEGAIRRLLVSKEGEEMKQRALEIQEKVKVGVCHGGSSHNSLKELVDFILSL

SEQ ID NO: 233 - DNA, 1485 bp, B. vulgaris
atgggtgcagaaccgcagcgtctgcatgttgttttttttccgctgatggcagcaggtcatctgattccgacactggatattgcaaaactgtttgcagcacatcatgtgaaaaccaccattattaccacaccgctgaatgcaccgtgttttacaaaaccgctggaaagctataaaaacctgggtcatcgtattgacattgaaattattccgtttccgagcaaagaagcaggtctgccggaaggtctggaaaattttgatcagtttaccagcgatcagatggccgtgaaatttctgaaagcaaccgaactgctgcaagaaagctttgaaaaattcctggaaaaacacaagccgaactgcattgttaccgatatgctgatgccgtttaccaataatgttgcagccaaatttaacatccctcgcattgtttttcatggctgtagctattttgcactgtgtatgatgcataccctgctgaaatatcagccgcataaaagcctgctgagtgatgatgaagaatttctggttccgaatctgccgcatgaaattaatctgacccgtagtcgcctgccggacatgatgcgtggtcagggtgataaagaactgaatgatgcatggatgaaaatctttatccacgcaatggaagccgaagaaaatagctttggtgtgatcatgaacagcttctatgaactggaaccggaatatgtggaatactatcgtaatgtgatgggtcgtaaagcatggcatattggtccggttagcctgtgtaatcgtgaaaatgaagcaaaatttcagcgtggcaaagatagcagcattaacgaacatgaatgtctgaaatggctggacagcaaaaaaccgaaaagcgttgtgtatatttgctttggtagcctggcagaagtgccgacactgcagctgcgtgaaattgcaatgggtttagaagcaagcgaacaggatttcatttgggttgttcgtcgtggtaaagaaaacgtggaagaagaaaaaatcgaagagtggctgccgtatgattttgaagatcgtatggaaggtaaaggcctgattattcgtggttgggcaccgcaggttctgattctggatcatgaagcaattggtgcatttgttacccattgtggttggaatagcaccctggaaggtattagctgtggtgttccgatggttacctggcctgtttttgcagaacagttctataatgaaaaactggtgaccgaagttctgaaaaccggtgttgcagttggtgcaaaaaaatggtcacgtattctggaagtgaacctgaaaagcgaggatatcaaaaatgcaattcgtcgtgttatggttggtgaagaagcactggttctgcgtagcaaagcaaaaaaactgaaagaactggcacgtaaagccgttgaaattggtggtagcagctatagcgatatgcatagcctgattcaggatctgagcagttataatgccaatggctataaacagtatctgtaa

SEQ ID NO: 234 - protein, 494 aa, B. vulgaris
MGAEPQRLHVVFFPLMAAGHLIPTLDIAKLFAAHHVKTTIITTPLNAPCFTKPLESYKNLGHRIDIEIIPFPSKEAGLPEGLENFDQFTSDQMAVKFLKATELLQESFEKFLEKHKPNCIVTDMLMPFTNNVAAKFNIPRIVFHGCSYFALCMMHTLLKYQPHKSLLSDDEEFLVPNLPHEINLTRSRLPDMMRGQGDKELNDAWMKIFIHAMEAEENSFGVIMNSFYELEPEYVEYYRNVMGRKAWHIGPVSLCNRENEAKFQRGKDSSINEHECLKWLDSKKPKSVVYICFGSLAEVPTLQLREIAMGLEASEQDFIWVVRRGKENVEEEKIEEWLPYDFEDRMEGKGLIIRGWAPQVLILDHEAIGAFVTHCGWNSTLEGISCGVPMVTWPVFAEQFYNEKLVTEVLKTGVAVGAKKWSRILEVNLKSEDIKNAIRRVMVGEEALVLRSKAKKLKELARKAVEIGGSSYSDMHSLIQDLSSYNANGYKQYL

SEQ ID NO: 235 - DNA, 1488 bp, C. papaya
atgggtagcgaagttctgcatcatgattatagccagctgaacatctttttctttccgtttatggcacatggtcatatgattccgacactggatatggcaaaactgtttgcaacccatggtgcaaaaaccagcattattaccacaccgctgaatctgccgttttttagcaaaagcattgaacgctttagcaaacagacaggtctggaaattggtgtgaaactgctgaattttccgagcgttgaagttggtctgccgagcggttgtgaaaatgcagatagcctgcctgccggtgaaccgctgattgtgaataaattctttgcagcagcaggcatgctgaaagatccgctggaacgtctgctgcaagagtttaaaccggattgtctgattgccgatatgttttttccgtggaccaccgatgcagcagccaaatttgatattccgcgtctggtttttcatggcaccagcttttttgcactgagcgcaagcgaatgtattcgtctgtataccccgtttaataacgttagcagcgatagcgaaccgtttctggtgccgacactgccggatgaaattcgtctgacccgtaatcagctggcagattttgcaatgaaagaaggtgacgaaaacggtattcatcgtctgattaaagaagccaaagaaagcgagctgaaaagctatggtgttgtggtgaatagcttttatgaactggaaccggcatatgcggatcattatcgtaattttctgaaacgcaaagcctggcatattggtccggttagcctgtgtaataaaaccgttgaagataaagccgaacgtggtaaacgtgcaagcattgatgaagatgaatgtctgaaatggctgaatagcaaagcaccgaatagcgtgatttatatctgctttggtagcatggccaattttaacagcgcacagctgatggaaattgcaaccgcactggatgcaagcggtcaagaattcatttgggttgttcgtcgcgaaaaaaacgaaaacaatcaagaagattggctgccggaaggttttgaacagcgtaccgaaggtaaaggtctgattattcgtggttgggcaccgcaggttctgattctggaacatgaagcagttggtggttttgttacccattgtggttggaatagcaccctggaaggtgttaccgcaggtatgccgatggttacctggcctgttagcgcagaacagttttataacgaaaaactggttaccgaggtgctgaaaattggtctgagcgtgggtgtgaaaaaatgggttcgtagcgaaggtgattttgtgagccgtgaaaaagttgaacaggcagttcgtgaaattatggttggtagtgaagccgttgaacgtcgtatgcgtgcaaaagcaatggcagatatggcacgtgcagcagttgaaaaaggtggtagcagctataatgatctgaatgcactgctgcgtgaagttagcctgatgcgtcgtcagcagagtcagaatcagtaa

SEQ ID NO: 236 - protein, 495 aa, C. papaya
MGSEVLHHDYSQLNIFFFPFMAHGHMIPTLDMAKLFATHGAKTSIITTPLNLPFFSKSIERFSKQTGLEIGVKLLNFPSVEVGLPSGCENADSLPAGEPLIVNKFFAAAGMLKDPLERLLQEFKPDCLIADMFFPWTTDAAAKFDIPRLVFHGTSFFALSASECIRLYTPFNNVSSDSEPFLVPTLPDEIRLTRNQLADFAMKEGDENGIHRLIKEAKESELKSYGVVVNSFYELEPAYADHYRNFLKRKAWHIGPVSLCNKTVEDKAERGKRASIDEDECLKWLNSKAPNSVIYICFGSMANFNSAQLMEIATALDASGQEFIWVVRREKNENNQEDWLPEGFEQRTEGKGLIIRGWAPQVLILEHEAVGGFVTHCGWNSTLEGVTAGMPMVTWPVSAEQFYNEKLVTEVLKIGLSVGVKKWVRSEGDFVSREKVEQAVREIMVGSEAVERRMRAKAMADMARAAVEKGGSSYNDLNALLREVSLMRRQQSQNQ

SEQ ID NO: 237 - DNA, 1524 bp, A. commosus
atgaaagatgtgacaccgcattttgttctggttccgctggcagcacagggtcatatgattccgatggttgatatggcacgtctgctggcagaacgtggtgttcgtgttaccctgattaccacaccggttaatgcagcacgtattcgtaccattattgatcgtgttcgtcgtagcaatctgccggttgaatttgttgaactgcgttttccgtgtgcagaatttggtctgccggaaggtagcgaaaatattgatctgctgagcaccctggaacactataaagcattttttgatgccatgaaactgctgaaagaaccgattgaagcactgctgcgtagccagcatcgtcgtccggattgtatgattgcagatatgtgtaatggttggaccaaagatgttgcacgtcgtctgggtattccgcgtctgctgtttcatggtccgagctgcttttatatcctgtgtgcctataatatggcacagcatcgtgtttatgatcgtgtgacccatgaatttgaaccggttgttgttccggatgttccggttgaagtggttaccaataaagcagaaagtccgggttttttcaattggagcggttgggaagatctgcgtgcagaagttctggaagccgaaagcaccgcagatggtgttgtgattaataccttttatgatctggaaccgagcttcgttgattgctatgaaaaaatcatgcagaaaaaggtttggaccgttggtccgctgtgtctgtatagcaaagatgtggatagcaaagcagcacgtggtaataaagccgcagttgatcatcgtgacattaccacctggctggatcgtaaaggtgcaagcagcgttttttatgttagctttggtagcctggttctgatgcgtccgacacagctgattgaaattggtaaaggtctgctggaatgcagcgatcatcgtagctttatttgggttgttaaagaagcagaactggttccggaagttgaaaaatggctgagcgaagaacattttgcagaacgtaccaaagaacgcggtctgctgattaaaggttgggctccgcagaccgttattctgctgcatccggcaattggtggttttctgacccattgtggttggaatagtaccctggaagcaattagtgccggtgttccgatgctgacctggcctcattttgccgatcagtttctgaatgaaaaactggttgttgacgtgctgaaaattggtcgtagcctggatgttaaagttccgcgtacacatgttaccgatgatagcaccctgctggtgaccaaagaaaaactgcgtaaagcagttagcgaactgatggaaggtgaagagggtgaagaaatgcgtcgtcgtgcaaaagcactggccgaaaaagcaaaaaaagccatggaagaaggtggtagcagctatcgtaatatggatgatatgattgaatgcatggcaggtcgttatggcgaagaagaaaaagttgaggacgcagttaaagaactgagcaatggttttagcgcacatgttgttgttacctaa

SEQ ID NO: 238 - protein, 507 aa, A. commosus
MKDVTPHFVLVPLAAQGHMIPMVDMARLLAERGVRVTLITTPVNAARIRTIIDRVRRSNLPVEFVELRFPCAEFGLPEGSENIDLLSTLEHYKAFFDAMKLLKEPIEALLRSQHRRPDCMIADMCNGWTKDVARRLGIPRLLFHGPSCFYILCAYNMAQHRVYDRVTHEFEPVVVPDVPVEVVTNKAESPGFFNWSGWEDLRAEVLEAESTADGVVINTFYDLEPSFVDCYEKIMQKKVWTVGPLCLYSKDVDSKAARGNKAAVDHRDITTWLDRKGASSVFYVSFGSLVLMRPTQLIEIGKGLLECSDHRSFIWVVKEAELVPEVEKWLSEEHFAERTKERGLLIKGWAPQTVILLHPAIGGFLTHCGWNSTLEAISAGVPMLTWPHFADQFLNEKLVVDVLKIGRSLDVKVPRTHVTDDSTLLVTKEKLRKAVSELMEGEEGEEMRRRAKALAEKAKKAMEEGGSSYRNMDDMIECMAGRYGEEEKVEDAVKELSNGFSAHVVVT

SEQ ID NO: 239 - DNA, 1452 bp, Q. suber
atgggtagcattcgtgcagcaaccaaaccgcatgttgtttgtgttccggcaccgctgcagggtcatattaccccgatgctgaaactggcaaaactgctgcatcataaaggttttcatgtgacctttgtgaacaccgagtataaccataatcgtctgctgcgtagccgtggtccgaatagcctggatggtctgcctggttttcattttgaaaccattccggatggcctgcctccgagtgatgcagatgttagccaggatattccgagcctggttaaaagcaccattaaaacctgtctgctgccgctgtgtaatctgattagcaaactgaatgataccagcagcagcaatgttccgcctgttaccagcattgttagtgatggttgtatgagctttaccctggatgcagccgacaaatttggtattccgtgtgttctgttttggaccccgagcgcatgtggttttctgagctatatgcattatcgtcatctggttgaacgtggtctggttccgctgaaagatgcaaattatctgaccaatggttatctggaaaccaccattaattggattccgggtatgaaaaacattcgcctgaaagatctgccgagctttattcgtaccaccgatgaaaatgatataatgctgaacttcaagatccgtgaaaccgaacgtgcaccgcgtgcaagcgcagttattctgaatacctttgatagctttgaacaagaggttctggatgcactgtatagcatgctgcctcgtatttatacaattggtccgctgatgctgctggcagatcagattaaagatgataacctgaaaagcatcggtagcaacctgtggaaagaagaactgggttgcgttgaatggctgaatagcaaagaaccgaatagcgttgtgtatgtgaattatggcagcatcaccattatgacaccgcaccagctgattgaatttgcatggggtttagcaaatagcgaaaaaccgtttctgtggattattcgtccggatctggttggtggtaatagcgcaattgttccgagcgaatttgttaccaaaaccaaagatcgtggtatgctggcaagctggtgtcatcaagagcagattctgaaacatccgagcattggttgttttctgacccatagcggttggaatagcaccctggaaagcgtttgttgtggtgttccgatgattagctggccgttttttgcagaacagctgacaaattgtcgttattgctgtgttgaatggggtattggcatggaaattgataataatgtgcagcgtgatgaggtggaaaaactggttcgtgaactgatggatggtgaaaaaggtaaagagctgaaaaaaaaggccatggaatggaaaatcaaagcagaagatgccaccaaaccgagcggtagcagctatcagaatatggataaactgattagcgaagtgctgttagccggtaatgtttaa

SEQ ID NO: 240 - protein, 483 aa, Q. suber
MGSIRAATKPHVVCVPAPLQGHITPMLKLAKLLHHKGFHVTFVNTEYNHNRLLRSRGPNSLDGLPGFHFETIPDGLPPSDADVSQDIPSLVKSTIKTCLLPLCNLISKLNDTSSSNVPPVTSIVSDGCMSFTLDAADKFGIPCVLFWTPSACGFLSYMHYRHLVERGLVPLKDANYLTNGYLETTINWIPGMKNIRLKDLPSFIRTTDENDIMLNFKIRETERAPRASAVILNTFDSFEQEVLDALYSMLPRIYTIGPLMLLADQIKDDNLKSIGSNLWKEELGCVEWLNSKEPNSVVYVNYGSITIMTPHQLIEFAWGLANSEKPFLWIIRPDLVGGNSAIVPSEFVTKTKDRGMLASWCHQEQILKHPSIGCFLTHSGWNSTLESVCCGVPMISWPFFAEQLTNCRYCCVEWGIGMEIDNNVQRDEVEKLVRELMDGEKGKELKKKAMEWKIKAEDATKPSGSSYQNMDKLISEVLLAGNV

SEQ ID NO: 241 - DNA, 1365 bp, V. vinifera
atgggtagcctgcatgttctggcaattccgtatgcagcacagggtcatgttattccgctgatggaactgagccagaatctggttatgcatggttttaaagtgaccttcgtgaacaccgatttttcccaagaacgtatcgttaaaagctttgccggtaaagatgatgtgcgtgatcagattcgtctggttagcattccggatggtctggaagcatgggaagatcgtaatgatctgggtaaagcatgtgaaggtattctgcgtgttatgccgaaaaaactggaagaactgatccaagaaattaaccgcaccgatgatcatgaaattgcatgtgttattgccgatggtcatatgggttgggcattagaagttgcagaaaaactgggtattaaacgtgcagcattttggccgagcgcagcagcaatgatggttctgacctttcgtatgcagaatctgattgatgatggcatcgttgatgatgatggtacaccggttaaaagccagaaatttcatctgagcccgaatatgccgaccattaataccgcaaatctgccgtggaccagcattggtgatagcaccgcacagaccctggttttcaaatatctgctgcgtaacaacaaaagcattaccgttgcagattggctgatttgcaatagcacctatgatctggaaccggatgcatttagcctggcgcagaccctgctgccggttggtccgctgctggcaagcaatcgtcaggcaaataccgcaggtcatttttggcctgaagatagcacctgtctggaatggctggatcagcagcctgcctgtagcgttatttatgttgcatttggtagcttcaccgtgtttgataaagcacagtttcgtgaactggcactgggtttagaactgtgtaatcgtccgtttctgtgggttgttcgtccggatattagtgccggtgcaaatgatgcatatccggaaggttttcaagaacgtgttagcacccgtggtctgatggttggttgggcaccgcagcagaaagttctgagccatccgagcgttgcatgttttctgagtcattgtggttggaatagcaccatggaaggtgttagcaatggtgttccttttctgtgttggccgtattttggcgatcagatcctgaataaaggctatatttgtgatgtttggcgtgttggtttaggtctggatcctgatgaacgtggtgttattctgggtgaagaaattcagaataaagtggatcagctgctgatggacgaaaaattcaaagcacgtgccatggaacttaaagaaatgacaggtcataatgttcgcgaaggtggtaaaagccataacaacctgaaaaactttatcgaatggatcaaaagctaa

SEQ ID NO: 242 - protein, 454 aa, V. vinifera
MGSLHVLAIPYAAQGHVIPLMELSQNLVMHGFKVTFVNTDFSQERIVKSFAGKDDVRDQIRLVSIPDGLEAWEDRNDLGKACEGILRVMPKKLEELIQEINRTDDHEIACVIADGHMGWALEVAEKLGIKRAAFWPSAAAMMVLTFRMQNLIDDGIVDDDGTPVKSQKFHLSPNMPTINTANLPWTSIGDSTAQTLVFKYLLRNNKSITVADWLICNSTYDLEPDAFSLAQTLLPVGPLLASNRQANTAGHFWPEDSTCLEWLDQQPACSVIYVAFGSFTVFDKAQFRELALGLELCNRPFLWVVRPDISAGANDAYPEGFQERVSTRGLMVGWAPQQKVLSHPSVACFLSHCGWNSTMEGVSNGVPFLCWPYFGDQILNKGYICDVWRVGLGLDPDERGVILGEEIQNKVDQLLMDEKFKARAMELKEMTGHNVREGGKSHNNLKNFIEWIKS

SEQ ID NO: 243 - DNA, 1473 bp, A. thaliana-S. rebaudiana hybrid
atgggcaaacaagaagatgccgaactggttattattccgtttccgtttagcggtcatattctggcaaccattgaactggcaaaacgtctgattagccaggataatccgcgtattcataccattaccattctgtattggggtctgccgtttattccgcaggcagataccattgcatttctgcgtagcctggttaaaaatgaaccgcgtatccgtctggttaccctgccggaagttcaggatccgcctccgatggaactgtttgttgaatttgcagaaagctatatcctggaatatgtgaaaaaaatggtgccgattattcgtgaagcactgagcaccctgctgagcagccgtgatgaaagcggtagcgttcgtgttgcaggtctggttctggattttttctgtgttccgatgattgatgtgggcaacgaatttaatctgccgagctatatctttctgacctgtagcgcaggttttctgggtatgatgaaatatctgccggaacgtcatcgtgaaatcaaaagcgaatttaaccgcagctttaacgaagaactgaatctgattccgggttatgttaatagcgttccgaccaaagtgctgccgagcggtctgtttatgaaagaaacctatgaaccgtgggtagaactggccgaacgttttccggaagcaaaaggtattctggttaatagctataccgcactggaaccgaatggcttcaaatatttcgatcgttgtccggataactacccgaccatttatccgattggtccgattctgaatctggaaaacaaaaaagatgatgccaaaaccgatgaaattatgcgctggctgaatgaacagccggaaagcagcgttgtgtttctgtgctttggtagcatgggtagctttaatgaaaaacaggtgaaagaaattgccgtggcaattgaacgtagtggtcatcgttttctgtggtcactgcgtcgtccgacaccgaaagaaaaaattgaatttccgaaagaatatgagaacctggaagaagttctgcctgaaggctttctgaaacgtaccagcagcattggtaaagttattggttgggcaccgcagatggcagttctgagccatccgagcgttggtggttttgttagccattgtggttggaatagcaccctggaaagcatgtggtgtggtgtgccgatggcagcatggcctctgtatgcagaacagaccctgaatgcctttctgctggttgttgaactgggtttagcagcagaaattcgtatggattatcgtaccgataccaaagccggttatgatggtggtatggaagttaccgttgaagaaattgaagatggcattcgcaaactgatgagtgatggtgaaattcgcaacaaagtgaaggatgtcaaagaaaaatcacgtgcagcagttgttgaaggtggtagcagctatgcaagtattggcaaattcattgaacatgtgagcaacgtgaccatttaa

SEQ ID NO: 244 - protein, 490 aa, A. thaliana-S. rebaudiana hybrid
MGKQEDAELVIIPFPFSGHILATIELAKRLISQDNPRIHTITILYWGLPFIPQADTIAFLRSLVKNEPRIRLVTLPEVQDPPPMELFVEFAESYILEYVKKMVPIIREALSTLLSSRDESGSVRVAGLVLDFFCVPMIDVGNEFNLPSYIFLTCSAGFLGMMKYLPERHREIKSEFNRSFNEELNLIPGYVNSVPTKVLPSGLFMKETYEPWVELAERFPEAKGILVNSYTALEPNGFKYFDRCPDNYPTIYPIGPILNLENKKDDAKTDEIMRWLNEQPESSVVFLCFGSMGSFNEKQVKEIAVAIERSGHRFLWSLRRPTPKEKIEFPKEYENLEEVLPEGFLKRTSSIGKVIGWAPQMAVLSHPSVGGFVSHCGWNSTLESMWCGVPMAAWPLYAEQTLNAFLLVVELGLAAEIRMDYRTDTKAGYDGGMEVTVEEIEDGIRKLMSDGEIRNKVKDVKEKSRAAVVEGGSSYASIGKFIEHVSNVTI

SEQ ID NO: 245 - DNA, 1437 bp, P. trichocarpa
atggcagaaaccgatagtccgcctcatgttgcaattctgccgagtcctggtatgggtcatctgattccgctggttgaactggcaaaacgtctggttcatcagcataatctgagcgtgacctttattatcccgaccgatggtagcccgagcaaagcacagcgtagcgttctgggtagcctgccgagcaccattcatagcgtttttctgcctccggttaatctgagtgatctgccggaagatgttaaaattgaaaccctgattagcctgaccgttgcacgttcactgccgagcctgcgtgatgttctgagcagcctggttgcaagcggcacccgtgttgttgcactggttgttgacctgtttggcaccgatgcatttgatgttgcacgtgaatttaaagcaagcccgtatatcttttatccggcaccggcaatggcactgagcctgtttttctatctgccgaaactggatgaaatggtgagctgtgaatatagcgaaatgcaagaaccggttgaaattccgggttgtctgccgattcatggtggtgaactgctggatccgacacgtgatcgtaaaaatgatgcatataaatggctgctgcatcacagcaaacgttatcgtctggccgaaggtgttatggtgaatagctttattgatctggaacgtggtgcactgaaagcactgcaagaagttgaaccgggtaaaccgcctgtttatccggttggtccgctggtgaatatggatagcaataccagcggtgttgaaggtagcgaatgtctgaaatggctggatgatcagccgctgggtagcgtgctgtttgttagctttggtagcggtggcaccctgagctttgatcagattaccgaactggcactgggtttagaaatgagcgaacagcgttttctgtgggttgcccgtgttccgaatgataaagttgcaaatgcaacctatttcagcgtggataatcacaaagatccgtttgattttctgccgaagggttttctggatcgtaccaaaggtcgtggtctggttgttccgagctgggcaccgcaggcacaggttctgagccatggtagcaccggtggttttctgacccattgtggttggaatagcaccctggaaagcgttgttaatgcagttccgctgattgtttggcctctgtatgcagaacagaaaatgaatgcatggatgctgaccaaagatgttgaagttgcactgcgtccgaaagcaagcgaaaatggtctgattggtcgtgaagaaattgccaatattgtgcgtggtctgatggaaggtgaagaaggtaaacgcgttcgtaatcgtatgaaagatctgaaagatgcagccgcagaagttctgagcgaagcaggtagcagcaccaaagcactgagtgaagttgcccgtaaatggaaaaaccataaatgtacccaggactgcaactaa

SEQ ID NO: 246 - protein, 478 aa, P. trichocarpa
MAETDSPPHVAILPSPGMGHLIPLVELAKRLVHQHNLSVTFIIPTDGSPSKAQRSVLGSLPSTIHSVFLPPVNLSDLPEDVKIETLISLTVARSLPSLRDVLSSLVASGTRVVALVVDLFGTDAFDVAREFKASPYIFYPAPAMALSLFFYLPKLDEMVSCEYSEMQEPVEIPGCLPIHGGELLDPTRDRKNDAYKWLLHHSKRYRLAEGVMVNSFIDLERGALKALQEVEPGKPPVYPVGPLVNMDSNTSGVEGSECLKWLDDQPLGSVLFVSFGSGGTLSFDQITELALGLEMSEQRFLWVARVPNDKVANATYFSVDNHKDPFDFLPKGFLDRTKGRGLVVPSWAPQAQVLSHGSTGGFLTHCGWNSTLESVVNAVPLIVWPLYAEQKMNAWMLTKDVEVALRPKASENGLIGREEIANIVRGLMEGEEGKRVRNRMKDLKDAAAEVLSEAGSSTKALSEVARKWKNHKCTQDCN

SEQ ID NO: 247 - DNA, 1428 bp, C. cardunculus
atggatgccactgattccaacggtagatctaaacaattgcacgttgctatgtttccatggttggctttcggtcatattatcccatttttggacctgtccaagttcattgctcaaaagggtcatagagtgtctttcttgtctaccaccagaaacattcaaagattgccaccatctcatctgtccccattgattactttggttccattgactttgccaccagaacatcatttgccacaacatgctgaagctaccattgatattagaacccatgatatgcagcacctgaaaaaggcttttgatggtttacaacaccagttgaccagattcttgcaggataattctccagattggatcatctacgattttgctccatattggttgccatctgttgctgctggtttgggtatttctagagcttttttctctatcgttaacgcctggtttttggcttttttgggtagatctgctgaagagatgattaacgattctcacgaaagaaccaccgtcgaagattttatggttccaccaaaatgggttccatttccaactaaggtttgttacagaaagcacgaagttaagtggatgttggattcttctacttgcttgaatgcttccggtgtttctgatacttataggtccggtatgattttccaaggttctgattgcgttttcatcaggtactgttacgaatttgaaccacaatggttgaccttgttggaagaattgcatcacttgccagttattccagttggtttgatgccaccagctaaagctactgatgttggtgacgaaaaagatgatgcttgggttaccattaagaaatggttggatggtcaacaaaaaggtcaagttgtttacgttgctttgggttccgaagttatgttgtctaattctgaagttggtgaattggccttgggtttagaattgtctggtttgccatttttctggggtttgagaaaacctgctggttctacttctgttgaattgccagaaggtttcttggaaagaactcataacagaggtatgttgtggaagtcttgggttccacaattgcaaatcttgtcccatgtttcagttggtggtttcttgactcattgcggttggggttctatagttgaaggtttgacttttggtcagcccttgattatgttgccattcttggttgatcaaggtttgaatgctagagccttggttgaaaaacaagttggtatggaagttccaagggatgagaaagatggttcctttacaaaagaatgggttgccgaatctgttagattggttgttgttgaagatgagggcaagatgtacaagagaaactctatggaactgagcaagattttcggtgataccaagttgcagaacaagtacactgatgatttcgtgaagtacttggaaaagcagagaatgtctgttccatctaacggttga

SEQ ID NO: 248 - protein, 475 aa, C. cardunculus
MDATDSNGRSKQLHVAMFPWLAFGHIIPFLDLSKFIAQKGHRVSFLSTTRNIQRLPPSHLSPLITLVPLTLPPEHHLPQHAEATIDIRTHDMQHLKKAFDGLQHQLTRFLQDNSPDWIIYDFAPYWLPSVAAGLGISRAFFSIVNAWFLAFLGRSAEEMINDSHERTTVEDFMVPPKWVPFPTKVCYRKHEVKWMLDSSTCLNASGVSDTYRSGMIFQGSDCVFIRYCYEFEPQWLTLLEELHHLPVIPVGLMPPAKATDVGDEKDDAWVTIKKWLDGQQKGQVVYVALGSEVMLSNSEVGELALGLELSGLPFFWGLRKPAGSTSVELPEGFLERTHNRGMLWKSWVPQLQILSHVSVGGFLTHCGWGSIVEGLTFGQPLIMLPFLVDQGLNARALVEKQVGMEVPRDEKDGSFTKEWVAESVRLVVVEDEGKMYKRNSMELSKIFGDTKLQNKYTDDFVKYLEKQRMSVPSNG

SEQ ID NO: 249 - DNA, 1329 bp, P. ginseng
atggacaaccagaacggtagaatttccattgctttgttgccatttttggcccatggtcatatttctccatttttcgaattggctaagcagttggctaagagaaactgtaacgttttcttgtgttctacgcccatcaacttgtcatccattaaggataaggattcctccgcctctattaagttggttgaattgcatttgccatcctctccagatttgccaccacattatcatacaactaatggtttgccaagccacttgatgttgcctttgagaaatgcttttgaaactgctggtccaaccttctccgaaattttgaaaactttgaaccccgacttgctgatctacgattttaatccatcttgggctccagaaattgcctcctcacataatattccagctgtttactttttgactaccgctgctgcttcttcctctattggtttacatgcttttaagaacccaggtgagaaatacccatttccagatttctacgacaactccaacattactccagaaccaccatctgctgataacatgaagttgttgcatgatttcattgcctgcttcgaaagatcctgcgatatcattttgatcaagtccttcagagaattggagggcaagtacattgatttgttgtctaccttgtccgacaagactttggttccagttggtccattggttcaagatccaatgggtcataatgaagatccaaagaccgaacaaatcatcaactggttggataagagagctgaatctaccgttgttttcgtttgtttcggttccgaatacttcttgtccaacgaagaattggaagaagttgccattggtttggaaatctccaccgttaatttcatttgggccgttagattgatcgaaggtgaaaagaaaggtatcttgccagaaggtttcgttcaaagagttggagatagaggtttggttgttgaaggttgggctcctcaagctagaattttgggtcattcttctactggtggtttcgtttctcattgtggttggtcatctattgccgaatctatgaagtttggtgttccagttattgctatggccagacatttggatcaaccattgaatggtaaattggctgccgaagttggtgttggtatggaagttgttagagatgagaatggcaagtataagagagaaggtatcgccgaagttatcagaaaggttgttgttgaaaagtccggtgaagtcattagaagaaaggctagagaattgtccgagaagatgaaggaaaaaggcgaacaagaaattgacagagccttggaagaactggttcaaatctgtaaaaagaagaaggacgagcagtaa

SEQ ID NO: 250 - protein, 442 aa, P. ginseng
MDNQNGRISIALLPFLAHGHISPFFELAKQLAKRNCNVFLCSTPINLSSIKDKDSSASIKLVELHLPSSPDLPPHYHTTNGLPSHLMLPLRNAFETAGPTFSEILKTLNPDLLIYDFNPSWAPEIASSHNIPAVYFLTTAAASSSIGLHAFKNPGEKYPFPDFYDNSNITPEPPSADNMKLLHDFIACFERSCDIILIKSFRELEGKYIDLLSTLSDKTLVPVGPLVQDPMGHNEDPKTEQIINWLDKRAESTVVFVCFGSEYFLSNEELEEVAIGLEISTVNFIWAVRLIEGEKKGILPEGFVQRVGDRGLVVEGWAPQARILGHSSTGGFVSHCGWSSIAESMKFGVPVIAMARHLDQPLNGKLAAEVGVGMEVVRDENGKYKREGIAEVIRKVVVEKSGEVIRRKARELSEKMKEKGEQEIDRALEELVQICKKKKDEQ

SEQ ID NO: 251 - DNA, 1452 bp, H. annuus
atgccaactaccgaaaccgattcattgcatggtagaaagcaattgcatgttgctatgtttccatggttggctttcggtcatattatcccatttttggagctgtccaagttgattgctcaaaagggtcatagagtgtctttcttgtctaccaccagaaacattcaaagattgccaactttgccatctcacttgtctccattgattaacttggttaagttgaccttgccacacgttccagaattgccaagaaatgctgaagctactatggatgttcataccgatgatatcccatacttgaaaaaggctttcgatggtttgttgccagaagttactagattcttggaagaagaatctccagactggatcatctatgattttgctccatattggttgccatctgttgctgctggtttgggtatttctagagcttacttttctatcgttaatgcctggttcggtgcttttattggtccatcttctgatgacttgatcaactcttcagatggtagaactaaggccgaagattttttgactccaccaaaatgggttccatttccatctaagttgtgttacagaaaacatgaggcctcttggttgttaggtggtttttctgttaatgcttccggtgtttctgatacctatagatctggtatggttttgaagggttctgactgcatgtttatcagacattgctacgaatttgaaccacagtggttgactttgttggaaaagttgcatcaattgccagttatcccagttggtttgatgccacctgaaactccaactactgttggtgaagaaaagaacgatacttggatgactgttaaggcttggttggatggtcaacaaaaaggtcatgttgtttacgttgctttgggttccgaagttatggtttccaaatctgaattggccgaattggctttaggtttggaattgtctggtttgccatttttctgggctttgagaaaacctgctggttctaatgaatctaactccgttgaattgccagacggttttttggaaagaactagacatagagctgttgtttggacttcttgggctccacaattgcaaattttgtctcatgcttcagttggtggtttcttgactcattgtggttggtcatctatagtcgaaggtttgatgtttggtcacccattgataatgttgccattcttggttgaccaaggtttgaacgctagaattttggttgataagcaagtcggtatcgaagtccctagaaatgaagaagatggttccttcaccaaagaatcagttgctagagctttgagatctgctgttgttagtgatgaaggtaagatctacaaggctaacgctatggaactgtctgaaatttttggtgacactaagttggagaagaggtacatcaaccatttcatcgactacctggaaaagaagagaagagttgtcgctattaacaacgaaacctaa

SEQ ID NO: 252 - protein, 483 aa, H. annuus
MPTTETDSLHGRKQLHVAMFPWLAFGHIIPFLELSKLIAQKGHRVSFLSTTRNIQRLPTLPSHLSPLINLVKLTLPHVPELPRNAEATMDVHTDDIPYLKKAFDGLLPEVTRFLEEESPDWIIYDFAPYWLPSVAAGLGISRAYFSIVNAWFGAFIGPSSDDLINSSDGRTKAEDFLTPPKWVPFPSKLCYRKHEASWLLGGFSVNASGVSDTYRSGMVLKGSDCMFIRHCYEFEPQWLTLLEKLHQLPVIPVGLMPPETPTTVGEEKNDTWMTVKAWLDGQQKGHVVYVALGSEVMVSKSELAELALGLELSGLPFFWALRKPAGSNESNSVELPDGFLERTRHRAVVWTSWAPQLQILSHASVGGFLTHCGWSSIVEGLMFGHPLIMLPFLVDQGLNARILVDKQVGIEVPRNEEDGSFTKESVARALRSAVVSDEGKIYKANAMELSEIFGDTKLEKRYINHFIDYLEKKRRVVAINNET

SEQ ID NO: 253 - DNA, 390 bp, P cyanescens
atggcctctaagatcgttaccttggatgaattgagagccaacaagtctagagagaagttctacattttgatccacggtaaggtttacgatgctaccaagtttatggatgaacatccaggtggtgatgaagttattttggctgaaggtggtcaagatgctactgaagcttttgaagatgttggtcattctgatgaagctagagctttgttgccagctatgttggttggtgattttgaaaaggattccggtatcactttgaaatctggtgctgctgctgcacaagcttctagagtttctaatgctgttgaacagggttccaacttgatgtactttgttccattgggtttgctaggtggttattttgcttggagattttacactggtgcctaa

SEQ ID NO: 254 - protein, 129 aa, P cyanescens
MASKIVTLDELRANKSREKFYILIHGKVYDATKFMDEHPGGDEVILAEGGQDATEAFEDVGHSDEARALLPAMLVGDFEKDSGITLKSGAAAAQASRVSNAVEQGSNLMYFVPLGLLGGYFAWRFYTGA

SEQ ID NO: 255 - DNA, 2103 bp, P cyanescens
atggatgccttgagaaaagttttcgaggataagaaagctgaaggtgttccagctttggttacttttgttactgctggttacccaagaaaggatgatactgttccaattttgttggccatgcaatctggtggtgctgatattattgaattgggtatcccattctccgatccaattgctgatggtccagttattcaagaagctaacactattgccttgaagaacgatatcgattacatcaccgttttgggtcaattgaaagaagccagaaatcaaggtttgactgctcctgttttgttgatgggttattacaacccattgattgcctacggtgaagatagagctattcaagatgctgctgaagctggtgctaatggtttcattatggttgatttgccaccagaagaagccattgcttttagagaaaaatgtagatccgctcagttgtcctacgttcctttgattgctccatctactaccttgtccagaattcaattcttgacctccattgccgattccttcatatatgttatgggtactactggctcctctgataaggttgctatgaacaattctctgccagatattatcgccagaatcagacaattcactgatgttccattggctgttggttttggtgtttctactagacaacatttcgaaactgtagccgaagccggtgcagatggtgttgttattggttctaaattggttaccgtcatgaagaactctgaaggtgatgctgttgcttctgttgaaaagtactgtagagaaatcaccttgaaggatgatccatccagagttagatctccaccaacttctagagttacttctccaaagtctgaagaacaaaaggcttttcaagttccagctgctgaaatggttttaccaccaagatttggtcaattcggtggtcaatatgttccagaagctttagttgattgcttggctgaattagaacaagctcataagtctgctatggccgatccagaatttcaaaaagaattgcaatcccacttcggttacatcaatagaccatctcaaatctacttggccgagaacttgacaaaacatgccggtggtgcttctatttggttgaaaagagaagatttgaaccacaccggttctcacaagattaacaatgccattggtcaaatcttgttggctagaagattgggtaagaccagaattattgctgaaacaggtgctggtcaacatggtgttgctactgctactgtttgtgctaaatttggtatggaatgcatcgtttacatgggtgctgaagatgttagaaggcaagctttgaacgttttcaggattgaaatgttaggtggtaaggttatcccagttcattctggttcttgtaccttgaaagatgctgttaacgaagctttgagagattgggttactaatttgtccaccactcattacttggttggttctgctattggtccacatccatttccaactatcgttagagatttccaaaaggtcatcggtgaagagatcaagcaacaaattcaagctgctagaggtaagttgccagatgttgttatagcttgtgttggtggtggttctaatgctatcggtactttctacgatttcatcccagataagtccgttagattgattggtgttgaggctggtggtgaaggtactcatggtgacaaacattctgctactttgtctatgggtcaaccaggtgttttacacggtgttagaacttacatcttgcaatctaaggccggtcaaattatcgaaacccattctatttctgccggtttggattatccaggtgttggtccagaacatgcatggttgaaagattctggtagagctgaatatgttgttgccactgatgaagaagccttgagaggttttagaatgttgactcaacaagagggtattatcccagcattggaatcttctcatgctatttggcaagctgttcaaactgctaagtctttgccaaaagaacaagatatcgttgtctgcttgtcaggtagaggtgataaggatgttgaacagatttctgagttgttgcctaaatgggccgatattttggattggcatgtttctccacatgctaaaggtggtagagcataa

SEQ ID NO: 256 - protein, 700 aa, P cyanescens
MDALRKVFEDKKAEGVPALVTFVTAGYPRKDDTVPILLAMQSGGADIIELGIPFSDPIADGPVIQEANTIALKNDIDYITVLGQLKEARNQGLTAPVLLMGYYNPLIAYGEDRAIQDAAEAGANGFIMVDLPPEEAIAFREKCRSAQLSYVPLIAPSTTLSRIQFLTSIADSFIYVMGTTGSSDKVAMNNSLPDIIARIRQFTDVPLAVGFGVSTRQHFETVAEAGADGVVIGSKLVTVMKNSEGDAVASVEKYCREITLKDDPSRVRSPPTSRVTSPKSEEQKAFQVPAAEMVLPPRFGQFGGQYVPEALVDCLAELEQAHKSAMADPEFQKELQSHFGYINRPSQIYLAENLTKHAGGASIWLKREDLNHTGSHKINNAIGQILLARRLGKTRIIAETGAGQHGVATATVCAKFGMECIVYMGAEDVRRQALNVFRIEMLGGKVIPVHSGSCTLKDAVNEALRDWVTNLSTTHYLVGSAIGPHPFPTIVRDFQKVIGEEIKQQIQAARGKLPDVVIACVGGGSNAIGTFYDFIPDKSVRLIGVEAGGEGTHGDKHSATLSMGQPGVLHGVRTYILQSKAGQIIETHSISAGLDYPGVGPEHAWLKDSGRAEYVVATDEEALRGFRMLTQQEGIIPALESSHAIWQAVQTAKSLPKEQDIVVCLSGRGDKDVEQISELLPKWADILDWHVSPHAKGGRA
